(19) United States
(12) Patent Application Publication
(10) Pub. No.: US 2008/0318790 A1
(43) Pub. Date: Dec. 25, 2008

(54) Process for the Production of Fine Chemicals

(75) Inventors: Marcus Ebneth, Berlin (DE); Piotr Puzio, Berlin (DE); Astrid Blau, Stahnsdorf (DE); Tilmann B. Walk, Berlin (DE); Volker Haake, Berlin (DE); Klaus Däschner, Maikammer (DE); Gunnar Plesch, Potsdam (DE)

Correspondence Address: CONNOLLY BOVE LODGE & HUTZ, LLP, P O BOX 2207, WILMINGTON, DE, 19899, US

(73) Assignee: Metanomics GmbH, Berlin (DE)

(21) Appl. No.: 11/547,454

(22) PCT Filed: Mar. 30, 2005
(86) PCT No.: PCT/EP2005/003297

§ 371 Date: Oct. 4, 2006

(30) Foreign Application Priority Data
Apr. 6, 2004 (EP) 04008291.9

(51) Int. Cl. A01N 37/18; C12P 13/12; A01K 67/027; A01H 5/00; C07H 21/04; C07H 21/02; C12N 15/63; C12N 1/21; C12N 5/10; C12P 21/02; C07K 2/00; C07K 16/00; C12Q 1/68; C12Q 1/02

(52) U.S. Cl. 504/307; 435/113; 800/8; 800/295; 536/23.1; 536/24.5; 435/320.1; 435/252.3; 435/419; 435/69.1; 530/300; 530/387.1; 435/29; 426/656; 426/658

(57) ABSTRACT

The present invention relates to a process for the production of methionine in an organism such as a microorganism, a non-human animal or plant. The invention furthermore relates to nucleic acid molecules, polypeptides, nucleic acid constructs, vectors, antisense molecules, antibodies, host cells, plant tissue, propagation material, harvested material, plants, microorganisms as well as agricultural compositions and to their use.

[0001] The present invention relates to a process for the production of methionine in an organism such as a microorganism, a non-human animal or plant. The invention furthermore relates to nucleic acid molecules, polypeptides, nucleic acid constructs, vectors, antisense molecules, antibodies, host cells, plant tissue, propagation material, harvested material, plants, microorganisms as well as agricultural compositions and to their use.

[0002] Amino acids are used in many branches of industry, including the food, animal feed, cosmetics, pharmaceutical and chemical industries. Amino acids such as D,L-methionine, L-lysine or L-threonine are used in the animal feed industry. The essential amino acids valine, leucine, isoleucine, lysine, threonine, methionine, tyrosine, phenylalanine and tryptophan are particularly important for the nutrition of humans and a number of livestock species. Glycine, L-methionine and tryptophan are all used in the pharmaceutical industry. Glutamine, valine, leucine, isoleucine, histidine, arginine, proline, serine and alanine are used in the pharmaceutical and cosmetics industries. Threonine, tryptophan and D,L-methionine are widely used feed additives (Leuchtenberger, W. (1996) Amino acids—technical production and use, pp. 466-502 in Rehm et al., (Ed.) Biotechnology vol. 6, chapter 14a, VCH Weinheim). Moreover, amino acids are suitable for the chemical industry as precursors for the synthesis of synthetic amino acids and proteins, such as N-acetylcysteine, S-carboxymethyl-L-cysteine, (S)-5-hydroxytryptophan and other substances described in Ullmann's Encyclopedia of Industrial Chemistry, vol. A2, pp. 57-97, VCH Weinheim, 1985.

[0003] Over one million tonnes of amino acids are currently produced annually; their market value amounts to over 2.5 billion US dollars. They are currently produced by four competing processes: Extraction from protein hydrolysates, for example L-cystine, L-leucine or L-tyrosine, chemical synthesis, for example of D,L-methionine, conversion of chemical precursors in an enzyme or cell reactor, for example L-phenylalanine, and fermentative production by growing, on an industrial scale, bacteria which have been developed to produce and secrete large amounts of the desired molecule in question. An organism, which is particularly suitable for this purpose is Corynebacterium glutamicum, which is used for example for the production of L-lysine or L-glutamic acid. Other amino acids which are produced by fermentation are, for example, L-threonine, L-tryptophan, L-aspartic acid and L-phenylalanine.

[0004] The biosynthesis of the natural amino acids in organisms capable of producing them, for example bacteria, has been characterized thoroughly; for a review of the bacterial amino acid biosynthesis and its regulation, see Umbarger, H. E. (1978) Ann. Rev. Biochem. 47: 533-606].

[0005] It is known that amino acids are produced by fermentation of strains of coryneform bacteria, in particular Corynebacterium glutamicum. Due to their great importance, the production processes are constantly being improved. Process improvements can relate to measures regarding technical aspects of the fermentation, such as, for example, stirring and oxygen supply, or the nutrient media composition, such as, for example, the sugar concentration during fermentation, or to the work-up to give the product, for example by ion exchange chromatography, or to the intrinsic performance properties of the microorganism itself. Bacteria from other genera such as Escherichia or Bacillus are also used for the production of amino acids. A number of mutant strains, which produce an assortment of desirable compounds from the group of the sulfur-containing fine chemicals have been developed via strain selection. The performance properties of said microorganisms are improved with respect to the production of a particular molecule by applying methods of mutagenesis, selection and mutant selection. Methods for the production of methionine have also been developed. In this manner, strains are obtained which are, for example, resistant to antimetabolites, such as, for example, the methionine analogues α-methylmethionine, ethionine, norleucine, N-acetylnorleucine, S-trifluoromethylhomocysteine, 2-amino-5-heprenoitic acid, selenomethionine, methionine sulfoximine, methoxine, 1-aminocyclopentanecarboxylic acid or which are auxotrophic for metabolites with regulatory importance and which produce sulfur-containing fine chemicals such as, for example, L-methionine. However, such processes developed for the production of methionine have the disadvantage that their yields are too low for being economically exploitable and that they are therefore not yet competitive with regard to chemical synthesis.

[0006] Zeh (Plant Physiol., Vol. 127, 2001: 792-802) describes increasing the methionine content in potato plants by inhibiting threonine synthase by what is known as antisense technology. This leads to a reduced threonine synthase activity without the threonine content in the plant being reduced. This technology is highly complex; the enzymatic activity must be inhibited in a very differentiated manner since otherwise auxotrophism for the amino acid occurs and the plant will no longer grow.

[0007] U.S. Pat. No. 5,589,616 teaches another attempt to produce higher amounts of amino acids in plants by overexpressing a monocot storage protein in dicots. WO 96/38574, WO 97/07665, WO 97/28247, U.S. Pat. No. 4,886,878, U.S. Pat. No. 5,082,993 and U.S. Pat. No. 5,670,635 are following this approach. That means in all the aforementioned intellectual property rights different proteins or polypeptides are expressed in plants. Said proteins or polypeptides should function as amino acid sinks. Other methods for increasing amino acids such as lysine are disclosed in WO 95/15392, WO 96/38574, WO 89/11789 or WO 93/19190. In this cases specific enzymes in the amino acid biosynthetic pathway such as the diphydrodipicolinic acid synthase are deregulated. This leads to an increase in the production of lysine in the different plants. Another approach to increase the level of amino acids in plants is disclosed in EP-A-0 271 408. EP-A-0 271 408 teaches the mutagenensis of plant and selection afterwards with inhibitors of certain enzymes of amino acid biosynthetic pathway.

[0008] Methods of recombinant DNA technology have also been used for some years to improve Corynebacterium strains producing L-amino acids by amplifying individual amino acid biosynthesis genes and investigating the effect on amino acid production.

[0009] As described above, the essential amino acids are necessary for humans and many mammals, for example for livestock. L-methionine is important as methyl group donor for the biosynthesis of, for example, choline, creatine, adrenaline, bases and RNA and DNA, histidine, and for the transmethylation following the formation of S-adenosylmethionine or as a sulfhydryl group donor for the formation of cysteine. Moreover, L-methionine appears to have a positive effect in depression.

[0010] Improving the quality of foodstuffs and animal feeds is an important task of the food-and-feed industry. This is necessary since, for example, certain amino acids, which occur in plants are limited with regard to the supply of mammals. Especially advantageous for the quality of foodstuffs and animal feeds is as balanced as possible an amino acid profile since a great excess of an amino acid above a specific concentration in the food has no further positive effect on the utilization of the food since other amino acids suddenly become limiting. A further increase in quality is only possible via addition of further amino acids, which are limiting under these conditions. The targeted addition of the limiting amino acid in the form of synthetic products must be carried out with extreme caution in order to avoid amino acid imbalance. For example, the addition of an essential amino acid stimulates protein digestion, which may cause deficiency situations for the second or third limiting amino acid, in particular. In feeding experiments, for example casein feeding experiments, the additional provision of methionine, which is limiting in casein, has revealed the fatty degeneration of liver, which could only be alleviated after the additional provision of tryptophan.

[0011] To ensure a high quality of foods and animal feeds, it is therefore necessary to add a plurality of amino acids in a balanced manner to suit the organism.

[0012] It is an object of the present invention to develop an inexpensive process for the synthesis of L-methionine. L-methionine is together with lysine or threonine depending on the organism one of the two amino acids, which are most frequently limiting.

[0013] It was now found that this object is achieved by providing the process according to the invention described herein and the embodiments characterized in the claims.

[0014] Accordingly, in a first embodiment, the invention relates to a process for the production of a fine chemical, whereby the fine chemical is methionine. Accordingly, in the present invention, the term “the fine chemical” as used herein relates to “methione”. Further, the term “the fine chemicals” as used herein also relates to fine chemicals comprising methionine.

[0015] In one embodiment, the term “the fine chemical” means L-methionine. Throughout the specification the term “the fine chemical” means L-methionine, its salts, ester or amids in free form or bound to proteins. In a preferred embodiment, the term “the fine chemical” means L-methionine in free form or its salts or bound to proteins.

[0016] Accordingly, the invention relates to a process for the production of methionine, which comprises the following steps:
[0017] a) reduction or deletion of the biological activity represented by the protein as depicted in SEQ ID NO: 2, SEQ ID NO: 8, SEQ ID NO: 20, SEQ ID NO: 64, SEQ ID NO: 65, SEQ ID NO: 152, SEQ ID NO: 229 or SEQ ID NO: 283 in a non-human organism, and
[0018] b) growing the organism under conditions which permit the production of methionine in said organism.

[0019] Advantageously the process for the production of the fine chemical leads to an enhanced production of said compound. The terms “enhanced” or “increase” mean at least a 10%, 20%, 30%, 40% or 50%, preferably at least 60%, 70%, 80%, 90% or 100%, more preferably 150%, 200%, 300%, 400% or 500% higher production of the fine chemical in comparison to the reference as defined below, that means in comparison to the organism without the aforementioned modification of the biological activity of protein of the invention.

[0020] Preferably, this process further includes the step of recovering the fine chemical, which is synthesized by the organism from the organism and/or from the culture medium used for the growth or maintenance of the organism.

[0021] The term “recovering” means the isolation of the fine chemical in different purities, that means on the one hand harvesting of the biological material, which contains the fine chemical without further purification and on the other hand purities of the fine chemical between 5% and 100% purity, preferred purities are in the range of 10% and 95%, more preferred between 20%, 30%, 40% or 50% and 60%, 70%, 80% or 90%.

[0022] Surprisingly, the transgenic reduction or deletion of the expression of the protein of the invention in Arabidopsis thaliana conferred an increase in the fine chemical content of the transformed plants.

[0023] In accordance with the invention, the term “organism” as understood herein relates always to a non-human organism, in particular to an animal or plant organism, the whole organism or cell(s) thereof, or to a microorganism. Further, the term “animal” as understood herein relates always to a non-human animal.

[0024] In accordance with the invention, a protein or polypeptide has the “activity or preferably biological activity of the protein as depicted in SEQ ID NO: 2, SEQ ID NO: 8, SEQ ID NO: 20, SEQ ID NO: 65, SEQ ID NO: 152, SEQ ID NO: 229 or SEQ ID NO: 283” if in the event its de novo activity or biological activity is reduced or deleted leads to an increased of the fine chemical. That means the reduction or deletion of its biological activity for example its enzymatic activity is somehow related to the production of the fine chemical. Throughout the specification the reduction or deletion of the biological activity of such a aforementioned protein or polypeptide or a nucleic acid molecule or sequence encoding such protein or polypeptide means a reduction of its biological activity for example its enzymatic activity of at least 10% preferably 20%, 30%, 40% or 50%, particularly preferably 60% 70% or 80%, most particularly preferably 90%, 91%, 92%, 93%, 94%, 95%, 96%, 97%, 98% or 99% in comparison to the biological activity of the protein as depicted in SEQ ID NO: 2, SEQ ID NO: 8, SEQ ID NO: 20, SEQ ID NO: 65, SEQ ID NO: 152, SEQ ID NO: 229 or SEQ ID NO: 283. Throughout the specification a deletion of the biological activity of the protein as depicted in SEQ ID NO: 2, SEQ ID NO: 8, SEQ ID NO: 20, SEQ ID NO: 65, SEQ ID NO: 152, SEQ ID NO: 229 or SEQ ID NO: 283 means a total loss of the activity. The reduction or deletion of the biological activity leads to an increase of the fine chemical of at least 10%, 20%, 30%, 40%, 50%, 100%, 150% or 200%, preferably of at least 250% or 300%, particularly preferably of at least 350% or 400%, most particularly preferably of at least 500% or 600% or more.

[0025] The terms “reduction”, “decrease” or “deletion” relate to a corresponding change of a property in an organism, a part of an organism such as a tissue, seed, root, leave, flower etc. or in a cell. Under “change of a property” it is understood that the activity, expression level or amount of a gene product or the metabolite content is changed in a specific volume or in a specific amount of protein relative to a corresponding volume or amount of protein of a control, reference or wild type. Preferably, the overall activity in the volume is reduced, decreased or deleted in cases if the reduction, decrease or deletion is related to the reduction, decrease or deletion of an activity of a gene product, independent whether the amount of gene product or the specific activity of the gene product or both is reduced, decreased or deleted or whether the amount, stability or translation efficacy of the nucleic acid sequence or gene encoding for the gene product is reduced, decreased or deleted.

[0026] The terms “reduction”, “decrease” or “deletion” include the change of said property in only parts of the subject of the present invention, for example, the modification can be found in compartment of a cell, like an organelle, or in a part of a plant, like tissue, seed, root, leave, flower etc. but is detectable if the overall subject, i.e. complete cell or plant, is tested. Preferably, the “reduction”, “decrease” or “deletion” is found cellular, thus the term “reduction, decrease or deletion of an activity” or “reduction, decrease or deletion of a metabolite content” relates to the cellular reduction, decrease or deletion compared to the wild type cell. In addition the terms “reduction”, “decrease” or “deletion” include the change of said property only during different growth phases of the organism used in the inventive process, for example the reduction, decrease or deletion takes place only during the seed growth or during blooming. Furthermore the terms include a transitional reduction, decrease or deletion for example because the used RNAi is not stable integrated in the genome of the organism and has therefore only a transient effect or is for example controlled by an inducible promoter.

[0027] Accordingly, the term “reduction”, “decrease” or “deletion” means that the specific activity of an enzyme or other protein or regulatory RNA as well as the amount of a compound or metabolite, e.g. of a polypeptide, a nucleic acid molecule or the fine chemical of the invention or an encoding mRNA or DNA, can be reduced, decreased or deleted in a volume.

[0028] The terms “wild type”, “control” or “reference” are exchangeable and can be a cell or a part of organisms such as an organelle or tissue, or an organism, in particular a microorganism or a plant, which was not modified or treated according to the herein described process according to the invention. Accordingly, the cell or a part of organisms such as an organelle or a tissue, or an organism, in particular a microorganism or a plant used as wild type, control or reference corresponds to the cell, organism or part thereof as much as possible and is in any other property but in the result of the process of the invention as identical to the subject matter of the invention as possible. Thus, the wild type, control or reference is treated identically or as identical as possible, saying that only conditions or properties might be different which do not influence the quality of the tested property.

[0029] Preferably, any comparison is carried out under analogous conditions. The term “analogous conditions” means that all conditions such as, for example, culture or growing conditions, assay conditions (such as buffer composition, temperature, substrates, pathogen strain, concentrations and the like) are kept identical between the experiments to be compared.

[0030] The “reference”, “control”, or “wild type” is preferably a subject, e.g. an organelle, a cell, a tissue, an organism, in particular a plant or a microorganism, which was not modified or treated according to the herein described process of the invention and is in any other property as similar to the subject matter of the invention as possible. The reference, control or wild type is in its genome, transcriptome, proteome or metabolome as similar as possible to the subject of the present invention. Preferably, the term “reference-” “control-” or “wild type-”-organelle, -cell, -tissue or -organism, in particular plant or microorganism, relates to an organelle, cell, tissue or organism, in particular plant or microorganism, which is nearly genetically identical to the organelle, cell, tissue or organism, in particular microorganism or plant, of the present invention or a part thereof preferably 95%, more preferred are 98%, even more preferred are 99.00%, in particular 99.10%, 99.30%, 99.50%, 99.70%, 99.90%, 99.99%, 99.999% or more. Most preferable the “reference”, “control”, or “wild type” is preferably a subject, e.g. an organelle, a cell, a tissue, an organism, which is genetically identical to the organism, cell organelle used according to the process of the invention except that nucleic acid molecules or the gene product encoded by them are changed according to the inventive process.

[0031] Preferably, the reference, control or wild type differs form the subject of the present invention only in the cellular activity of the polypeptide or RNA of the invention, e.g. as result of a reduction, decrease or deletion in the level of the nucleic acid molecule of the present invention or a reduction, decrease or deletion of the specific activity of the polypeptide or RNA of the invention, e.g. by the expression level or activity of protein or RNA that means its biological activity and/or its biochemical or genetical causes.

[0032] The term “expression” means the transcription of a gene into structural RNA (rRNA, tRNA, miRNA) or messenger RNA (mRNA) with the subsequent transaction of the latter into a protein. Experimentally, expression can be detected by e.g. Northern, qRT PCR, transcriptional run-on assays or Western blotting and other immuno assays. As consequence of the reduction, decrease or deletion of the expression that means as consequence of the reduced, decreased or deleted transcription of a gene a related phenotypic trait appears such as the enhanced or increased production of the fine chemical.

[0033] Accordingly, preferred reference subject is the starting subject of the present process of the invention. Preferably, the reference and the subject matter of the invention are compared after standardization and normalization, e.g. to the amount of total RNA, DNA, or Protein or activity or expression of reference genes, like housekeeping genes, such as ubiquitin.

[0034] A series of mechanisms exists via which a modification in the polypeptide of the invention can directly or indirectly affect the yield, production and/or production efficiency of the amino acid. For example, the molecule number or the specific activity of the polypeptide of the invention or the number of expression of the nucleic acid molecule of the invention may be reduced, decreased or deleted. However, it is also possible to reduce, decrease or delete the expression of the gene which is naturally present in the organisms, for example by modifying the regulation of the gene, or by reducing or decreasing the stability of the mRNA or of the gene product encoded by the nucleic acid molecule of the invention.

[0035] This also applies analogously to the combined reduction, decrease or deletion of the expression of the nucleic acid molecule of the present invention or its gene product together with the manipulation of further activities such as enzymes of the amino acid biosynthesis pathways.

[0036] The reduction, decrease, deletion or modulation according to this invention can be constitutive, e.g. due to a stable permanent transgenic expression or to a stable mutation in the corresponding endogenous gene encoding the nucleic acid molecule of the invention or to a modulation of the expression or of the behaviour of a gene conferring the expression of the polypeptide of the invention, or transient, e.g. due to an transient transformation, a transiently active promotor or temporary addition of a modulator such as an antagonist or inductor, e.g. after transformation with a inducible construct carrying a double-stranded RNA nucleic acid molecule, an antisense nucleic acid molecule, a ribozyme of the invention etc. under control of a inducible promoter and adding the inducer, e.g. tetracycline or as described herein below.

[0037] The reduction, decrease or deletion in activity amounts preferably by at least 10%, preferably by at least 30% or at least 60%, especially preferably by at least 70%, 80%, 85%, 90% or more, very especially preferably are at least 95%, more preferably are at least 99% or more in comparison to the control, reference or wild type. Most preferably the reduction, decrease or deletion in activity amounts to 100%.

[0038] The specific activity of a polypeptide encoded by a nucleic acid molecule of the present invention or of the polypeptide of the present invention can be tested as described in the examples. In particular, the reduction, decrease or deletion of the expression of a protein in question in a cell, e.g. a plant cell or a microorganism and the detection of an increase of the fine chemical level as well as in comparison to a control is an easy test and can be performed as described in the examples.

[0039] The term “reduction”, “decrease” or “deletion” includes, that the reason for said “reduction”, “decrease” or “deletion is a chemical compound, which is administered to the organism.

[0040] Accordingly, in the following, the term “reducing”, “decreasing” or “deleting” also comprises the term “debasing”, “depleting”, diminishing” or “bringing down”. The decreased or reduced activity manifests itself in an increase in the fine chemical. In this context, the fine chemical amount in a cell, preferably in a tissue, more preferred in an organism as a plant or a microorganism or part thereof, is increased by 3% or more, especially preferably are 10% or more, very especially preferably are more than 30% and most preferably are 70% or more, such as 100%, 300% or 500% or more. The fine chemical can be contained in the organism either in its free form and/or bound to proteins or polypeptides or mixtures thereof or can be advantageously excreated.

[0041] A protein having a biological activity of the proteins used in the inventive process preferably has the structure of the polypeptide described herein, in particular of the polypeptides shown in SEQ ID NO: 2, SEQ ID NO: 4, SEQ ID NO: 6, SEQ ID NO: 8, SEQ ID NO: 10, SEQ ID NO: 12, SEQ ID NO: 14, SEQ ID NO: 16, SEQ ID NO: 20, SEQ ID NO: 22, SEQ ID NO: 24, SEQ ID NO: 26, SEQ ID NO: 28, SEQ ID NO. 30, SEQ ID NO: 32; SEQ ID NO: 65, SEQ ID NO: 67, SEQ ID NO: 69, SEQ ID NO: 71, SEQ ID NO: 73, SEQ ID NO: 75, SEQ ID NO: 77, SEQ ID NO: 79, SEQ ID NO: 81, SEQ ID NO: 83, SEQ ID NO: 85, SEQ ID NO: 87, SEQ ID NO: 89, SEQ ID NO: 91, SEQ ID NO: 93, SEQ ID NO: 95, SEQ ID NO: 97, SEQ ID NO: 99, SEQ ID NO: 101, SEQ ID NO: 103, SEQ ID NO: 105, SEQ ID NO: 107, SEQ ID NO: 109, SEQ ID NO: 111, SEQ ID NO: 113, SEQ ID NO: 115, SEQ ID NO: 117, SEQ ID NO: 119, SEQ ID NO: 121, SEQ ID NO: 123, SEQ ID NO: 125, SEQ ID NO: 127, SEQ ID NO: 129, SEQ ID NO: 131, SEQ ID NO: 133, SEQ ID NO: 135, SEQ ID NO: 137, SEQ ID NO: 139, SEQ ID NO: 141, SEQ ID NO: 143, SEQ ID NO: 152, SEQ ID NO: 154, SEQ ID NO: 156, SEQ ID NO: 158, SEQ ID NO: 160, SEQ ID NO: 162, SEQ ID NO: 164, SEQ ID NO: 166, SEQ ID NO: 168, SEQ ID NO: 170, SEQ ID NO: 172, SEQ ID NO: 174, SEQ ID NO: 176, SEQ ID NO: 178, SEQ ID NO: 180, SEQ ID NO: 182, SEQ ID NO: 184, SEQ ID NO: 186, SEQ ID NO: 188, SEQ ID NO: 190, SEQ ID NO: 192, SEQ ID NO: 194, SEQ ID NO: 196, SEQ ID NO: 198, SEQ ID NO: 200, SEQ ID NO: 202, SEQ ID NO: 204, SEQ ID NO: 206, SEQ ID NO: 208, SEQ ID NO: 210, SEQ ID NO: 212, SEQ ID NO: 214, SEQ ID NO: 216, SEQ ID NO: 218, SEQ ID NO: 220, SEQ ID NO: 229, SEQ ID NO:231, SEQ ID NO:233, SEQ ID NO: 235, SEQ ID NO: 237, SEQ ID NO: 239, SEQ ID NO: 241, SEQ ID NO: 243, SEQ ID NO: 250, SEQ ID NO: 252, SEQ ID NO: 254, SEQ ID NO: 256, SEQ ID NO: 258, SEQ ID NO: 260, SEQ ID NO: 262, SEQ ID NO: 264, SEQ ID NO: 266, SEQ ID NO: 268, SEQ ID NO: 270, SEQ ID NO: 272, SEQ ID NO: 283, SEQ ID NO: 285, SEQ ID NO: 287, SEQ ID NO: 289, SEQ ID NO: 291, SEQ ID NO: 293, SEQ ID NO: 295, SEQ ID NO: 297, SEQ ID NO: 299, SEQ ID NO: 301, SEQ ID NO: 303, SEQ ID NO: 305, SEQ ID NO: 307, SEQ ID NO: 309, SEQ ID NO: 311, SEQ ID NO: 313, SEQ ID NO: 315, SEQ ID NO: 317, SEQ ID NO: 319, SEQ ID NO: 321, SEQ ID NO: 323, SEQ ID NO: 325, SEQ ID NO: 327, SEQ ID NO: 329, SEQ ID NO: 331, SEQ ID NO: 333, SEQ ID NO: 335, SEQ ID NO: 337, SEQ ID NO: 339, SEQ ID NO: 341, SEQ ID NO: 343, SEQ ID NO: 345, SEQ ID NO: 347, SEQ ID NO: 349, SEQ ID NO: 351, SEQ ID NO: 353, SEQ ID NO: 355, SEQ ID NO: 357, SEQ ID NO: 359, SEQ ID NO: 361, SEQ ID NO: 363, SEQ ID NO: 365, SEQ ID NO: 367, SEQ ID NO: 369, SEQ ID NO: 371, SEQ ID NO: 373, SEQ ID NO: 375, SEQ ID NO: 377, SEQ ID NO: 379, SEQ ID NO: 381, SEQ ID NO: 383, SEQ ID NO: 385, SEQ ID NO: 387, SEQ ID NO: 389, SEQ ID NO: 391, SEQ ID NO: 393, SEQ ID NO: 395, SEQ ID NO: 397, SEQ ID NO: 399, SEQ ID NO: 401, SEQ ID NO: 403, SEQ ID NO: 405, SEQ ID NO: 407, SEQ ID NO: 409, SEQ ID NO: 411, SEQ ID NO: 413, SEQ ID NO: 415, SEQ ID NO: 417, SEQ ID NO: 419, SEQ ID NO: 421, SEQ ID NO: 423, SEQ ID NO: 425, SEQ ID NO: 427, SEQ ID NO: 429, SEQ ID NO: 431, SEQ ID NO: 433, SEQ ID NO: 435 or SEQ ID NO: 441 or the functional homologues thereof as described herein, or is encoded by the nucleic acid molecule characterized herein or the nucleic acid molecule according to the invention, for example by the nucleic acid molecule shown in SEQ ID NO: 1, SEQ ID NO: 3, SEQ ID NO: 5, SEQ ID NO: 7, SEQ ID NO: 9, SEQ ID NO: 11, SEQ ID NO: 13, SEQ ID NO: 15, SEQ ID NO: 19, SEQ ID NO: 21, SEQ ID NO: 23, SEQ ID NO: 25, SEQ ID NO: 27, SEQ ID NO: 29, SEQ ID NO: 31; SEQ ID NO: 64, SEQ ID NO: 66, SEQ ID NO: 68, SEQ ID NO: 70, SEQ ID NO: 72, SEQ ID NO: 74, SEQ ID NO: 76, SEQ ID NO: 78, SEQ ID NO: 80, SEQ ID NO: 82, SEQ ID NO: 84, SEQ ID NO: 86, SEQ ID NO: 88, SEQ ID NO: 90, SEQ ID NO: 92, SEQ ID NO: 94, SEQ ID NO: 96, SEQ ID NO: 98, SEQ ID NO: 100, SEQ ID NO: 102, SEQ ID NO: 104, SEQ ID NO: 106, SEQ ID NO: 108, SEQ ID NO: 110, SEQ ID NO: 112, SEQ ID NO: 114, SEQ ID NO: 116, SEQ ID NO: 118, SEQ ID NO: 120, SEQ ID NO: 122, SEQ ID NO: 124, SEQ ID NO: 126, SEQ ID NO: 128, SEQ ID NO: 130, SEQ ID NO: 132, SEQ ID NO: 134, SEQ ID NO: 136, SEQ ID NO: 138, SEQ ID NO: 140, SEQ ID NO: , SEQ ID NO: 142, SEQ ID NO: 151, SEQ ID NO: 153, SEQ ID NO: 155, SEQ ID NO: 157, SEQ ID NO: 159, SEQ ID NO: 161, SEQ ID NO: 163, SEQ ID NO: 165, SEQ ID NO: 167, SEQ ID NO: 169, SEQ ID NO: 171, SEQ ID NO: 173, SEQ ID NO: 175, SEQ ID NO: 177, SEQ ID NO: 179, SEQ ID NO: 181, SEQ ID NO: 183, SEQ ID NO: 185, SEQ ID NO: 187, SEQ ID NO: 189, SEQ ID NO: 191, SEQ ID NO: 193, SEQ ID NO: 195, SEQ ID NO: 197, SEQ ID NO: 199, SEQ ID NO: 201, SEQ ID NO: 203, SEQ ID NO: 205, SEQ ID NO: 207, SEQ ID NO: 209, SEQ ID NO: 211, SEQ ID NO: 213, SEQ ID NO: 215, SEQ ID NO: 217, SEQ ID NO: 219, SEQ ID NO: 228, SEQ ID NO: 230, SEQ ID NO: 232, SEQ ID NO: 234, SEQ ID NO: 236, SEQ ID NO: 238, SEQ ID NO: 240, SEQ ID NO: 242, SEQ ID NO: 249, SEQ ID NO: 251, SEQ ID NO: 253, SEQ ID NO: 255, SEQ ID NO: 257, SEQ ID NO: 259, SEQ ID NO: 261, SEQ ID NO: 263, SEQ ID NO: 265, SEQ ID NO: 267, SEQ ID NO: 269, SEQ ID NO: 271, SEQ ID NO: 282, SEQ ID NO: 284, SEQ ID NO: 286, SEQ ID NO: 288, SEQ ID NO: 290, SEQ ID NO: 292, SEQ ID NO: 294, SEQ ID NO: 296, SEQ ID NO: 298, SEQ ID NO: 300, SEQ ID NO: 302, SEQ ID NO: 304, SEQ ID NO: 306, SEQ ID NO: 308, SEQ ID NO: 310, SEQ ID NO: 312, SEQ ID NO: 314, SEQ ID NO: 316, SEQ ID NO: 318, SEQ ID NO: 320, SEQ ID NO: 322, SEQ ID NO: 324, SEQ ID NO: 326, SEQ ID NO: 328, SEQ ID NO: 330, SEQ ID NO: 332, SEQ ID NO: 334, SEQ ID NO: 336, SEQ ID NO: 338, SEQ ID NO: 340, SEQ ID NO: 342, SEQ ID NO: 344, SEQ ID NO: 346, SEQ ID NO: 348, SEQ ID NO: 350, SEQ ID NO: 352, SEQ ID NO: 354, SEQ ID NO: 356, SEQ ID NO: 358, SEQ ID NO: 360, SEQ ID NO: 362, SEQ ID NO: 364, SEQ ID NO: 366, SEQ ID NO: 368, SEQ ID NO: 370, SEQ ID NO: 372, SEQ ID NO: 374, SEQ ID NO: 376, SEQ ID NO: 378, SEQ ID NO: 380, SEQ ID NO: 382, SEQ ID NO: 384, SEQ ID NO: 386, SEQ ID NO: 388, SEQ ID NO: 390, SEQ ID NO: 392, SEQ ID NO: 394, SEQ ID NO: 396, SEQ ID NO: 398, SEQ ID NO: 400, SEQ ID NO: 402, SEQ ID NO: 404, SEQ ID NO: 406, SEQ ID NO: 408, SEQ ID NO: 410, SEQ ID NO: 412, SEQ ID NO: 414, SEQ ID NO: 416, SEQ ID NO: 418, SEQ ID NO: 420, SEQ ID NO: 422, SEQ ID NO: 424, SEQ ID NO: 426, SEQ ID NO: 428, SEQ ID NO: 430, SEQ ID NO: 432, SEQ ID NO: 434 or SEQ ID NO: 440 or its herein described functional homologues and has the abovementioned activity.

[0042] For the purposes of the present invention, the terms “L-methionine” or methionine” also encompass the corresponding salts, such as, for example, methionine hydrochloride or methionine sulfate. Preferably the term methionine is intended to encompass the term L-methionine.

[0043] Owing to the biological activity of the proteins which are used in the process according to the invention and which are encoded by nucleic acid molecules according to the invention, it is possible to produce amino acid compositions. Depending on the choice of the organism used for the process according to the present invention, for example a microorganism or a plant, compositions or mixtures of various amino acids can be produced.

[0044] The term “expression” refers to the transcription and/or translation of a codogenic gene segment or gene. As a rule, the resulting product is a mRNA or a protein. However, expression products can also include functional RNAs such as, for example, antisense, tRNAs, snRNAs, rRNAs, dsRNA, siRNA, miRNAs, ribozymes etc. Expression may be systemic, local or temporal, for example limited to certain cell types, tissues organs or time periods.

[0045] In one embodiment, the process of the present invention comprises one or more of the following steps
[0046] a) destabilizing a protein enabling the reduced, decreased or deleted expression of a protein encoded by the nucleic acid molecule of the invention or of the polypeptide of the invention, e.g. of a polypeptide having the biological activity of a protein as depicted in SEQ ID NO: 2, SEQ ID NO: 4, SEQ ID NO: 6, SEQ ID NO: 8, SEQ ID NO: 10, SEQ ID NO: 12, SEQ ID NO: 14, SEQ ID NO: 16, SEQ ID NO: 20, SEQ ID NO: 22, SEQ ID NO: 24, SEQ ID NO: 26, SEQ ID NO: 28, SEQ ID NO. 30, SEQ ID NO: 32; SEQ ID NO: 65, SEQ ID NO: 67, SEQ ID NO: 69, SEQ ID NO: 71, SEQ ID NO: 73, SEQ ID NO: 75, SEQ ID NO: 77, SEQ ID NO: 79, SEQ ID NO: 81, SEQ ID NO: 83, SEQ ID NO: 85, SEQ ID NO: 87, SEQ ID NO: 89, SEQ ID NO: 91, SEQ ID NO: 93, SEQ ID NO: 95, SEQ ID NO: 97, SEQ ID NO: 99, SEQ ID NO: 101, SEQ ID NO: 103, SEQ ID NO: 105, SEQ ID NO: 107, SEQ ID NO: 109, SEQ ID NO: 111, SEQ ID NO: 113, SEQ ID NO: 115, SEQ ID NO: 117, SEQ ID NO: 119, SEQ ID NO: 121, SEQ ID NO: 123, SEQ ID NO: 125, SEQ ID NO: 127, SEQ ID NO: 129, SEQ ID NO: 131, SEQ ID NO: 133, SEQ ID NO: 135, SEQ ID NO: 137, SEQ ID NO: 139, SEQ ID NO: 141, SEQ ID NO: 143, SEQ ID NO: 152, SEQ ID NO: 154, SEQ ID NO: 156, SEQ ID NO: 158, SEQ ID NO: 160, SEQ ID NO: 162, SEQ ID NO: 164, SEQ ID NO: 166, SEQ ID NO: 168, SEQ ID NO: 170, SEQ ID NO: 172, SEQ ID NO: 174, SEQ ID NO: 176, SEQ ID NO: 178, SEQ ID NO: 180, SEQ ID NO: 182, SEQ ID NO: 184, SEQ ID NO: 186, SEQ ID NO: 188, SEQ ID NO: 190, SEQ ID NO: 192, SEQ ID NO: 194, SEQ ID NO: 196, SEQ ID NO: 198, SEQ ID NO: 200, SEQ ID NO: 202, SEQ ID NO: 204, SEQ ID NO: 206, SEQ ID NO: 208, SEQ ID NO: 210, SEQ ID NO: 212, SEQ ID NO: 214, SEQ ID NO: 216, SEQ ID NO: 218, SEQ ID NO: 220, SEQ ID NO: 229, SEQ ID NO:231, SEQ ID NO:233, SEQ ID NO: 235, SEQ ID NO: 237, SEQ ID NO: 239, SEQ ID NO: 241, SEQ ID NO: 243, SEQ ID NO: 250, SEQ ID NO: 252, SEQ ID NO: 254, SEQ ID NO: 256, SEQ ID NO: 258, SEQ ID NO: 260, SEQ ID NO: 262, SEQ ID NO: 264, SEQ ID NO: 266, SEQ ID NO: 268, SEQ ID NO: 270, SEQ ID NO: 272, SEQ ID NO: 283, SEQ ID NO: 285, SEQ ID NO: 287, SEQ ID NO: 289, SEQ ID NO: 291, SEQ ID NO: 293, SEQ ID NO: 295, SEQ ID NO: 297, SEQ ID NO: 299, SEQ ID NO: 301, SEQ ID NO: 303, SEQ ID NO: 305, SEQ ID NO: 307, SEQ ID NO: 309, SEQ ID NO: 311, SEQ ID NO: 313, SEQ ID NO: 315, SEQ ID NO: 317, SEQ ID NO: 319, SEQ ID NO: 321, SEQ ID NO: 323, SEQ ID NO: 325, SEQ ID NO: 327, SEQ ID NO: 329, SEQ ID NO: 331, SEQ ID NO: 333, SEQ ID NO: 335, SEQ ID NO: 337, SEQ ID NO: 339, SEQ ID NO: 341, SEQ ID NO: 343, SEQ ID NO: 345, SEQ ID NO: 347, SEQ ID NO: 349, SEQ ID NO: 351, SEQ ID NO: 353, SEQ ID NO: 355, SEQ ID NO: 357, SEQ ID NO: 359, SEQ ID NO: 361, SEQ ID NO: 363, SEQ ID NO: 365, SEQ ID NO: 367, SEQ ID NO: 369, SEQ ID NO: 371, SEQ ID NO: 373, SEQ ID NO: 375, SEQ ID NO: 377, SEQ ID NO: 379, SEQ ID NO: 381, SEQ ID NO: 383, SEQ ID NO: 385, SEQ ID NO: 387, SEQ ID NO: 389, SEQ ID NO: 391, SEQ ID NO: 393, SEQ ID NO: 395, SEQ ID NO: 397, SEQ ID NO: 399, SEQ ID NO: 401, SEQ ID NO: 403, SEQ ID NO: 405, SEQ ID NO: 407, SEQ ID NO: 409, SEQ ID NO: 411, SEQ ID NO: 413, SEQ ID NO: 415, SEQ ID NO: 417, SEQ ID NO: 419, SEQ ID NO: 421, SEQ ID NO: 423, SEQ ID NO: 425, SEQ ID NO: 427, SEQ ID NO: 429, SEQ ID NO: 431, SEQ ID NO: 433, SEQ ID NO: 435 or SEQ ID NO: 441 leading to the herein-mentioned fine chemical increasing activity; or
[0047] b) destabilizing a mRNA enabling the reduced, decreased or deleted expression of a protein encoded by the nucleic acid molecule of the invention, e.g. of a polypeptide having the biological activity of protein as depicted in SEQ ID NO: 2, SEQ ID NO: 4, SEQ ID NO: 6, SEQ ID NO: 8, SEQ ID NO: 10, SEQ ID NO: 12, SEQ ID NO: 14, SEQ ID NO: 16, SEQ ID NO: 20, SEQ ID NO: 22, SEQ ID NO: 24, SEQ ID NO: 26, SEQ ID NO: 28, SEQ ID NO. 30, SEQ ID NO: 32; SEQ ID NO: 65, SEQ ID NO: 67, SEQ ID NO: 69, SEQ ID NO: 71, SEQ ID NO: 73, SEQ ID NO: 75, SEQ ID NO: 77, SEQ ID NO: 79, SEQ ID NO: 81, SEQ ID NO: 83, SEQ ID NO: 85, SEQ ID NO: 87, SEQ ID NO: 89, SEQ ID NO: 91, SEQ ID NO: 93, SEQ ID NO: 95, SEQ ID NO: 97, SEQ ID NO: 99, SEQ ID NO: 101, SEQ ID NO: 103, SEQ ID NO: 105, SEQ ID NO: 107, SEQ ID NO: 109, SEQ ID NO: 111, SEQ ID NO: 113, SEQ ID NO: 115, SEQ ID NO: 117, SEQ ID NO: 119, SEQ ID NO: 121, SEQ ID NO: 123, SEQ ID NO: 125, SEQ ID NO: 127, SEQ ID NO: 129, SEQ ID NO: 131, SEQ ID NO: 133, SEQ ID NO: 135, SEQ ID NO: 137, SEQ ID NO: 139, SEQ ID NO: 141, SEQ ID NO: 143, SEQ ID NO: 152, SEQ ID NO: 154, SEQ ID NO: 156, SEQ ID NO: 158, SEQ ID NO: 160, SEQ ID NO: 162, SEQ ID NO: 164, SEQ ID NO: 166, SEQ ID NO: 168, SEQ ID NO: 170, SEQ ID NO: 172, SEQ ID NO: 174, SEQ ID NO: 176, SEQ ID NO: 178, SEQ ID NO: 180, SEQ ID NO: 182, SEQ ID NO: 184, SEQ ID NO: 186, SEQ ID NO: 188, SEQ ID NO: 190, SEQ ID NO: 192, SEQ ID NO: 194, SEQ ID NO: 196, SEQ ID NO: 198, SEQ ID NO: 200, SEQ ID NO: 202, SEQ ID NO: 204, SEQ ID NO: 206, SEQ ID NO: 208, SEQ ID NO: 210, SEQ ID NO: 212, SEQ ID NO: 214, SEQ ID NO: 216, SEQ ID NO: 218, SEQ ID NO: 220, SEQ ID NO: 229, SEQ ID NO:231, SEQ ID NO:233, SEQ ID NO: 235, SEQ ID NO: 237, SEQ ID NO: 239, SEQ ID NO: 241, SEQ ID NO: 243, SEQ ID NO: 250, SEQ ID NO: 252, SEQ ID NO: 254, SEQ ID NO: 256, SEQ ID NO: 258, SEQ ID NO: 260, SEQ ID NO: 262, SEQ ID NO: 264, SEQ ID NO: 266, SEQ ID NO: 268, SEQ ID NO: 270, SEQ ID NO: 272, SEQ ID NO: 283, SEQ ID NO: 285, SEQ ID NO: 287, SEQ ID NO: 289, SEQ ID NO: 291, SEQ ID NO: 293, SEQ ID NO: 295, SEQ ID NO: 297, SEQ ID NO: 299, SEQ ID NO: 301, SEQ ID NO: 303, SEQ ID NO: 305, SEQ ID NO: 307, SEQ ID NO: 309, SEQ ID NO: 311, SEQ ID NO: 313, SEQ ID NO: 315, SEQ ID NO: 317, SEQ ID NO: 319, SEQ ID NO: 321, SEQ ID NO: 323, SEQ ID NO: 325, SEQ ID NO: 327, SEQ ID NO: 329, SEQ ID NO: 331, SEQ ID NO: 333, SEQ ID NO: 335, SEQ ID NO: 337, SEQ ID NO: 339, SEQ ID NO: 341, SEQ ID NO: 343, SEQ ID NO: 345, SEQ ID NO: 347, SEQ ID NO: 349, SEQ ID NO: 351, SEQ ID NO: 353, SEQ ID NO: 355, SEQ ID NO: 357, SEQ ID NO: 359, SEQ ID NO: 361, SEQ ID NO: 363, SEQ ID NO: 365, SEQ ID NO: 367, SEQ ID NO: 369, SEQ ID NO: 371, SEQ ID NO: 373, SEQ ID NO: 375, SEQ ID NO: 377, SEQ ID NO: 379, SEQ ID NO: 381, SEQ ID NO: 383, SEQ ID NO: 385, SEQ ID NO: 387, SEQ ID NO: 389, SEQ ID NO: 391, SEQ ID NO: 393, SEQ ID NO: 395, SEQ ID NO: 397, SEQ ID NO: 399, SEQ ID NO: 401, SEQ ID NO: 403, SEQ ID NO: 405, SEQ ID NO: 407, SEQ ID NO: 409, SEQ ID NO: 411, SEQ ID NO: 413, SEQ ID NO: 415, SEQ ID NO: 417, SEQ ID NO: 419, SEQ ID NO: 421, SEQ ID NO: 423, SEQ ID NO: 425, SEQ ID NO: 427, SEQ ID NO: 429, SEQ ID NO: 431, SEQ ID NO: 433, SEQ ID NO: 435 or SEQ ID NO: 441 or of a mRNA encoding the polypeptide of the present invention leading to the herein-mentioned fine chemical increasing activity; or
[0048] c) Increasing the biological activity of a protein or RNA e.g. increasing the biological activity of a repressor enabling the reduced, decreased or deleted expression of a protein encoded by the nucleic acid molecule of the invention or of the polypeptide of the present invention leading to the herein-mentioned fine chemical increasing activity, e.g. of a polypeptide having the biological activity of the protein as depicted SEQ ID NO: 2, SEQ ID NO: 4, SEQ ID NO: 6, SEQ ID NO: 8, SEQ ID NO: 10, SEQ ID NO: 12, SEQ ID NO: 14, SEQ ID NO: 16, SEQ ID NO: 20, SEQ ID NO: 22, SEQ ID NO: 24, SEQ ID NO: 26, SEQ ID NO: 28, SEQ ID NO. 30, SEQ ID NO: 32; SEQ ID NO: 65, SEQ ID NO: 67, SEQ ID NO: 69, SEQ ID NO: 71, SEQ ID NO: 73, SEQ ID NO: 75, SEQ ID NO: 77, SEQ ID NO: 79, SEQ ID NO: 81, SEQ ID NO: 83, SEQ ID NO: 85, SEQ ID NO: 87, SEQ ID NO: 89, SEQ ID NO: 91, SEQ ID NO: 93, SEQ ID NO: 95, SEQ ID NO: 97, SEQ ID NO: 99, SEQ ID NO: 101, SEQ ID NO: 103, SEQ ID NO: 105, SEQ ID NO: 107, SEQ ID NO: 109, SEQ ID NO: 111, SEQ ID NO: 113, SEQ ID NO: 115, SEQ ID NO: 117, SEQ ID NO: 119, SEQ ID NO: 121, SEQ ID NO: 123, SEQ ID NO: 125, SEQ ID NO: 127, SEQ ID NO: 129, SEQ ID NO: 131, SEQ ID NO: 133, SEQ ID NO: 135, SEQ ID NO: 137, SEQ ID NO: 139, SEQ ID NO: 141, SEQ ID NO: 143, SEQ ID NO: 152, SEQ ID NO: 154, SEQ ID NO: 156, SEQ ID NO: 158, SEQ ID NO: 160, SEQ ID NO: 162, SEQ ID NO: 164, SEQ ID NO: 166, SEQ ID NO: 168, SEQ ID NO: 170, SEQ ID NO: 172, SEQ ID NO: 174, SEQ ID NO: 176, SEQ ID NO: 178, SEQ ID NO: 180, SEQ ID NO: 182, SEQ ID NO: 184, SEQ ID NO: 186, SEQ ID NO: 188, SEQ ID NO: 190, SEQ ID NO: 192, SEQ ID NO: 194, SEQ ID NO: 196, SEQ ID NO: 198, SEQ ID NO: 200, SEQ ID NO: 202, SEQ ID NO: 204, SEQ ID NO: 206, SEQ ID NO: 208, SEQ ID NO: 210, SEQ ID NO: 212, SEQ ID NO: 214, SEQ ID NO: 216, SEQ ID NO: 218, SEQ ID NO: 220, SEQ ID NO: 229, SEQ ID NO:231, SEQ ID NO:233, SEQ ID NO: 235, SEQ ID NO: 237, SEQ ID NO: 239, SEQ ID NO: 241, SEQ ID NO: 243, SEQ ID NO: 250, SEQ ID NO: 252, SEQ ID NO: 254, SEQ ID NO: 256, SEQ ID NO: 258, SEQ ID NO: 260, SEQ ID NO: 262, SEQ ID NO: 264, SEQ ID NO: 266, SEQ ID NO: 268, SEQ ID NO: 270, SEQ ID NO: 272, SEQ ID NO: 283, SEQ ID NO: 285, SEQ ID NO: 287, SEQ ID NO: 289, SEQ ID NO: 291, SEQ ID NO: 293, SEQ ID NO: 295, SEQ ID NO: 297, SEQ ID NO: 299, SEQ ID NO: 301, SEQ ID NO: 303, SEQ ID NO: 305, SEQ ID NO: 307, SEQ ID NO: 309, SEQ ID NO: 311, SEQ ID NO: 313, SEQ ID NO: 315, SEQ ID NO: 317, SEQ ID NO: 319, SEQ ID NO: 321, SEQ ID NO: 323, SEQ ID NO: 325, SEQ ID NO: 327, SEQ ID NO: 329, SEQ ID NO: 331, SEQ ID NO: 333, SEQ ID NO: 335, SEQ ID NO: 337, SEQ ID NO: 339, SEQ ID NO: 341, SEQ ID NO: 343, SEQ ID NO: 345, SEQ ID NO: 347, SEQ ID NO: 349, SEQ ID NO: 351, SEQ ID NO: 353, SEQ ID NO: 355, SEQ ID NO: 357, SEQ ID NO: 359, SEQ ID NO: 361, SEQ ID NO: 363, SEQ ID NO: 365, SEQ ID NO: 367, SEQ ID NO: 369, SEQ ID NO: 371, SEQ ID NO: 373, SEQ ID NO: 375, SEQ ID NO: 377, SEQ ID NO: 379, SEQ ID NO: 381, SEQ ID NO: 383, SEQ ID NO: 385, SEQ ID NO: 387, SEQ ID NO: 389, SEQ ID NO: 391, SEQ ID NO: 393, SEQ ID NO: 395, SEQ ID NO: 397, SEQ ID NO: 399, SEQ ID NO: 401, SEQ ID NO: 40.3, SEQ ID NO: 405, SEQ ID NO: 407, SEQ ID NO: 409, SEQ ID NO: 411, SEQ ID NO: 413, SEQ ID NO: 415, SEQ ID NO: 417, SEQ ID NO: 419, SEQ ID NO: 421, SEQ ID NO: 423, SEQ ID NO: 425, SEQ ID NO: 427, SEQ ID NO: 429, SEQ ID NO: 431, SEQ ID NO: 433, SEQ ID NO: 435 or SEQ ID NO: 441, or increasing the inhibitory regulation of the polypeptide of the invention; or
[0049] d) Increasing the biological activity of a protein or RNA e.g. increasing the biological activity of a repressor enabling the reduced, decreased or deleted expression of a protein encoded by the nucleic acid molecule of the present invention or a polypeptide of the present invention leading to the herein-mentioned fine chemical increasing activity, e.g. of a polypeptide having the biological activity of the protein as depicted SEQ ID NO: 2, SEQ ID NO: 4, SEQ ID NO: 6, SEQ ID NO: 8, SEQ ID NO: 10, SEQ ID NO: 12, SEQ ID NO: 14, SEQ ID NO: 16, SEQ ID NO: 20, SEQ ID NO: 22, SEQ ID NO: 24, SEQ ID NO: 26, SEQ ID NO: 28, SEQ ID NO. 30, SEQ ID NO: 32; SEQ ID NO: 65, SEQ ID NO: 67, SEQ ID NO: 69, SEQ ID NO: 71, SEQ ID NO: 73, SEQ ID NO: 75, SEQ ID NO: 77, SEQ ID NO: 79, SEQ ID NO: 81, SEQ ID NO: 83, SEQ ID NO: 85, SEQ ID NO: 87, SEQ ID NO: 89, SEQ ID NO: 91, SEQ ID NO: 93, SEQ ID NO: 95, SEQ ID NO: 97, SEQ ID NO: 99, SEQ ID NO: 101, SEQ ID NO: 103, SEQ ID NO: 105, SEQ ID NO: 107, SEQ ID NO: 109, SEQ ID NO: 111, SEQ ID NO: 113, SEQ ID NO: 115, SEQ ID NO: 117, SEQ ID NO: 119, SEQ ID NO: 121, SEQ ID NO: 123, SEQ ID NO: 125, SEQ ID NO: 127, SEQ ID NO: 129, SEQ ID NO: 131, SEQ ID NO: 133, SEQ ID NO: 135, SEQ ID NO: 137, SEQ ID NO: 139, SEQ ID NO: 141, SEQ ID NO: 143, SEQ ID NO: 152, SEQ ID NO: 154, SEQ ID NO: 156, SEQ ID NO: 158, SEQ ID NO: 160, SEQ ID NO: 162, SEQ ID NO: 164, SEQ ID NO: 166, SEQ ID NO: 168, SEQ ID NO: 170, SEQ ID NO: 172, SEQ ID NO: 174, SEQ ID NO: 176, SEQ ID NO: 178, SEQ ID NO: 180, SEQ ID NO: 182, SEQ ID NO: 184, SEQ ID NO: 186, SEQ ID NO: 188, SEQ ID NO: 190, SEQ ID NO: 192, SEQ ID NO: 194, SEQ ID NO: 196, SEQ ID NO: 198, SEQ ID NO: 200, SEQ ID NO: 202, SEQ ID NO: 204, SEQ ID NO: 206, SEQ ID NO: 208, SEQ ID NO: 210, SEQ ID NO: 212, SEQ ID NO: 214, SEQ ID NO: 216, SEQ ID NO: 218, SEQ ID NO: 220, SEQ ID NO: 229, SEQ ID NO:231, SEQ ID NO:233, SEQ ID NO: 235, SEQ ID NO: 237, SEQ ID NO: 239, SEQ ID NO: 241, SEQ ID NO: 243, SEQ ID NO: 250, SEQ ID NO: 252, SEQ ID NO: 254, SEQ ID NO: 256, SEQ ID NO: 258, SEQ ID NO: 260, SEQ ID NO: 262, SEQ ID NO: 264, SEQ ID NO: 266, SEQ ID NO: 268, SEQ ID NO: 270, SEQ ID NO: 272, SEQ ID NO: 283, SEQ ID NO: 285, SEQ ID NO: 287, SEQ ID NO: 289, SEQ ID NO: 291, SEQ ID NO: 293, SEQ ID NO: 295, SEQ ID NO: 297, SEQ ID NO: 299, SEQ ID NO: 301, SEQ ID NO: 303, SEQ ID NO: 305, SEQ ID NO: 307, SEQ ID NO: 309, SEQ ID NO: 311, SEQ ID NO: 313, SEQ ID NO: 315, SEQ ID NO: 317, SEQ ID NO: 319, SEQ ID NO: 321, SEQ ID NO: 323, SEQ ID NO: 325, SEQ ID NO: 327, SEQ ID NO: 329, SEQ ID NO: 331, SEQ ID NO: 333, SEQ ID NO: 335, SEQ ID NO: 337, SEQ ID NO: 339, SEQ ID NO: 341, SEQ ID NO: 343, SEQ ID NO: 345, SEQ ID NO: 347, SEQ ID NO: 349, SEQ ID NO: 351, SEQ ID NO: 353, SEQ ID NO: 355, SEQ ID NO: 357, SEQ ID NO: 359, SEQ ID NO: 361, SEQ ID NO: 363, SEQ ID NO: 365, SEQ ID NO: 367, SEQ ID NO: 369, SEQ ID NO: 371, SEQ ID NO: 373, SEQ ID NO: 375, SEQ ID NO: 377, SEQ ID NO: 379, SEQ ID NO: 381, SEQ ID NO: 383, SEQ ID NO: 385, SEQ ID NO: 387, SEQ ID NO: 389, SEQ ID NO: 391, SEQ ID NO: 393, SEQ ID NO: 395, SEQ ID NO: 397, SEQ ID NO: 399, SEQ ID NO: 401, SEQ ID NO: 403, SEQ ID NO: 405, SEQ ID NO: 407, SEQ ID NO: 409, SEQ ID NO: 411, SEQ ID NO: 413, SEQ ID NO: 415, SEQ ID NO: 417, SEQ ID NO: 419, SEQ ID NO: 421, SEQ ID NO: 423, SEQ ID NO: 425, SEQ ID NO: 427, SEQ ID NO: 429, SEQ ID NO: 431, SEQ ID NO: 433, SEQ ID NO: 435 or SEQ ID NO: 441, by adding one or more exogenous repression factors such as a chemical compound for example an inhibitor to the organisms or parts thereof; or
[0050] e) reducing, decreasing or deleting the copy number of a gene e.g. reducing, decreasing or deleting the copy number of a gene encoding an activator enabling the increased expression of a nucleic acid molecule encoding a polypeptide encoded by the nucleic acid molecule of the invention or the polypeptide of the invention having herein-mentioned fine chemical increasing activity, e.g. of a polypeptide having the biological activity of the protein as depicted SEQ ID NO: 2, SEQ ID NO: 4, SEQ ID NO: 6, SEQ ID NO: 8, SEQ ID NO: 10, SEQ ID NO: 12, SEQ ID NO: 14, SEQ ID NO: 16, SEQ ID NO: 20, SEQ ID NO: 22, SEQ ID NO: 24, SEQ ID NO: 26, SEQ ID NO: 28, SEQ ID NO. 30, SEQ ID NO: 32; SEQ ID NO: 65, SEQ ID NO: 67, SEQ ID NO: 69, SEQ ID NO: 71, SEQ ID NO: 73, SEQ ID NO: 75, SEQ ID NO: 77, SEQ ID NO: 79, SEQ ID NO: 81, SEQ ID NO: 83, SEQ ID NO: 85, SEQ ID NO: 87, SEQ ID NO: 89, SEQ ID NO: 91, SEQ ID NO: 93, SEQ ID NO: 95, SEQ ID NO: 97, SEQ ID NO: 99, SEQ ID NO: 101, SEQ ID NO: 103, SEQ ID NO: 105, SEQ ID NO: 107, SEQ ID NO: 109, SEQ ID NO: 111, SEQ ID NO: 113, SEQ ID NO: 115, SEQ ID NO: 117, SEQ ID NO: 119, SEQ ID NO: 121, SEQ ID NO: 123, SEQ ID NO: 125, SEQ ID NO: 127, SEQ ID NO: 129, SEQ ID NO: 131, SEQ ID NO: 133, SEQ ID NO: 135, SEQ ID NO: 137, SEQ ID NO: 139, SEQ ID NO: 141, SEQ ID NO: 143, SEQ ID NO: 152, SEQ ID NO: 154, SEQ ID NO: 156, SEQ ID NO: 158, SEQ ID NO: 160, SEQ ID NO: 162, SEQ ID NO: 164, SEQ ID NO: 166, SEQ ID NO: 168, SEQ ID NO: 170, SEQ ID NO: 172, SEQ ID NO: 174, SEQ ID NO: 176, SEQ ID NO: 178, SEQ ID NO: 180, SEQ ID NO: 182, SEQ ID NO: 184, SEQ ID NO: 186, SEQ ID NO: 188, SEQ ID NO: 190, SEQ ID NO: 192, SEQ ID NO: 194, SEQ ID NO: 196, SEQ ID NO: 198, SEQ ID NO: 200, SEQ ID NO: 202, SEQ ID NO: 204, SEQ ID NO: 206, SEQ ID NO: 208, SEQ ID NO: 210, SEQ ID NO: 212, SEQ ID NO: 214, SEQ ID NO: 216, SEQ ID NO: 218, SEQ ID NO: 220, SEQ ID NO: 229, SEQ ID NO:231, SEQ ID NO:233, SEQ ID NO: 235, SEQ ID NO: 237, SEQ ID NO: 239, SEQ ID NO: 241, SEQ ID NO: 243, SEQ ID NO: 250, SEQ ID NO: 252, SEQ ID NO: 254, SEQ ID NO: 256, SEQ ID NO: 258, SEQ ID NO: 260, SEQ ID NO: 262, SEQ ID NO: 264, SEQ ID NO: 266, SEQ ID NO: 268, SEQ ID NO: 270, SEQ ID NO: 272, SEQ ID NO: 283, SEQ ID NO: 285, SEQ ID NO: 287, SEQ ID NO: 289, SEQ ID NO: 291, SEQ ID NO: 293, SEQ ID NO: 295, SEQ ID NO: 297, SEQ ID NO: 299, SEQ ID NO: 301, SEQ ID NO: 303, SEQ ID NO: 305, SEQ ID NO: 307, SEQ ID NO: 309, SEQ ID NO: 311, SEQ ID NO: 313, SEQ ID NO: 315, SEQ ID NO: 317, SEQ ID NO: 319, SEQ ID NO: 321, SEQ ID NO: 323, SEQ ID NO: 325, SEQ ID NO: 327, SEQ ID NO: 329, SEQ ID NO: 331, SEQ ID NO: 333, SEQ ID NO: 335, SEQ ID NO: 337, SEQ ID NO: 339, SEQ ID NO: 341, SEQ ID NO: 343, SEQ ID NO: 345, SEQ ID NO: 347, SEQ ID NO: 349, SEQ ID NO: 351, SEQ ID NO: 353, SEQ ID NO: 355, SEQ ID NO: 357, SEQ ID NO: 359, SEQ ID NO: 361, SEQ ID NO: 363, SEQ ID NO: 365, SEQ ID NO: 367, SEQ ID NO: 369, SEQ ID NO: 371, SEQ ID NO: 373, SEQ ID NO: 375, SEQ ID NO: 377, SEQ ID NO: 379, SEQ ID NO: 381, SEQ ID NO: 383, SEQ ID NO: 385, SEQ ID NO: 387, SEQ ID NO: 389, SEQ ID NO: 391, SEQ ID NO: 393, SEQ ID NO: 395, SEQ ID NO: 397, SEQ ID NO: 399, SEQ ID NO: 401, SEQ ID NO: 403, SEQ ID NO: 405, SEQ ID NO: 407, SEQ ID NO: 409, SEQ ID NO: 411, SEQ ID NO: 413, SEQ ID NO: 415, SEQ ID NO: 417, SEQ ID NO: 419, SEQ ID NO: 421, SEQ ID NO: 423, SEQ ID NO: 425, SEQ ID NO: 427, SEQ ID NO: 429, SEQ ID NO: 431, SEQ ID NO: 433, SEQ ID NO: 435 or SEQ ID NO: 441; or
[0051] f) reducing, decreasing or deleting the expression of the endogenous gene encoding the polypeptide of the invention, e.g. a polypeptide having the biological activity of the protein used in the inventive process such as the protein as depicted SEQ ID NO: 2, SEQ ID NO: 4, SEQ ID NO: 6, SEQ ID NO: 8, SEQ ID NO: 10, SEQ ID NO: 12, SEQ ID NO: 14, SEQ ID NO: 16, SEQ ID NO: 20, SEQ ID NO: 22, SEQ ID NO: 24, SEQ ID NO: 26, SEQ ID NO: 28, SEQ ID NO. 30, SEQ ID NO: 32; SEQ ID NO: 65, SEQ ID NO: 67, SEQ ID NO: 69, SEQ ID NO: 71, SEQ ID NO: 73, SEQ ID NO: 75, SEQ ID NO: 77, SEQ ID NO: 79, SEQ ID NO: 81, SEQ ID NO: 83, SEQ ID NO: 85, SEQ ID NO: 87, SEQ ID NO: 89, SEQ ID NO: 91, SEQ ID NO: 93, SEQ ID NO: 95, SEQ ID NO: 97, SEQ ID NO: 99, SEQ ID NO: 101, SEQ ID NO: 103, SEQ ID NO: 105, SEQ ID NO: 107, SEQ ID NO: 109, SEQ ID NO: 111, SEQ ID NO: 113, SEQ ID NO: 115, SEQ ID NO: 117, SEQ ID NO: 119, SEQ ID NO: 121, SEQ ID NO: 123, SEQ ID NO: 125, SEQ ID NO: 127, SEQ ID NO: 129, SEQ ID NO: 131, SEQ ID NO: 133, SEQ ID NO: 135, SEQ ID NO: 137, SEQ ID NO: 139, SEQ ID NO: 141, SEQ ID NO: 143, SEQ ID NO: 152, SEQ ID NO: 154, SEQ ID NO: 156, SEQ ID NO: 158, SEQ ID NO: 160, SEQ ID NO: 162, SEQ ID NO: 164, SEQ ID NO: 166, SEQ ID NO: 168, SEQ ID NO: 170, SEQ ID NO: 172, SEQ ID NO: 174, SEQ ID NO: 176, SEQ ID NO: 178, SEQ ID NO: 180, SEQ ID NO: 182, SEQ ID NO: 184, SEQ ID NO: 186, SEQ ID NO: 188, SEQ ID NO: 190, SEQ ID NO: 192, SEQ ID NO: 194, SEQ ID NO: 196, SEQ ID NO: 198, SEQ ID NO: 200, SEQ ID NO: 202, SEQ ID NO: 204, SEQ ID NO: 206, SEQ ID NO: 208, SEQ ID NO: 210, SEQ ID NO: 212, SEQ ID NO: 214, SEQ ID NO: 216, SEQ ID NO: 218, SEQ ID NO: 220, SEQ ID NO: 229, SEQ ID NO:231, SEQ ID NO:233, SEQ ID NO: 235, SEQ ID NO: 237, SEQ ID NO: 239, SEQ ID NO: 241, SEQ ID NO: 243, SEQ ID NO: 250, SEQ ID NO: 252, SEQ ID NO: 254, SEQ ID NO: 256, SEQ ID NO: 258, SEQ ID NO: 260, SEQ ID NO: 262, SEQ ID NO: 264, SEQ ID NO: 266, SEQ ID NO: 268, SEQ ID NO: 270, SEQ ID NO: 272, SEQ ID NO: 283, SEQ ID NO: 285, SEQ ID NO: 287, SEQ ID NO: 289, SEQ ID NO: 291, SEQ ID NO: 293, SEQ ID NO: 295, SEQ ID NO: 297, SEQ ID NO: 299, SEQ ID NO: 301, SEQ ID NO: 303, SEQ ID NO: 305, SEQ ID NO: 307, SEQ ID NO: 309, SEQ ID NO: 311, SEQ ID NO: 313, SEQ ID NO: 315, SEQ ID NO: 317, SEQ ID NO: 319, SEQ ID NO: 321, SEQ ID NO: 323, SEQ ID NO: 325, SEQ ID NO: 327, SEQ ID NO: 329, SEQ ID NO: 331, SEQ ID NO: 333, SEQ ID NO: 335, SEQ ID NO: 337, SEQ ID NO: 339, SEQ ID NO: 341, SEQ ID NO: 343, SEQ ID NO: 345, SEQ ID NO: 347, SEQ ID NO: 349, SEQ ID NO: 351, SEQ ID NO: 353, SEQ ID NO: 355, SEQ ID NO: 357, SEQ ID NO: 359, SEQ ID NO: 361, SEQ ID NO: 363, SEQ ID NO: 365, SEQ ID NO: 367, SEQ ID NO: 369, SEQ ID NO: 371, SEQ ID NO: 373, SEQ ID NO: 375, SEQ ID NO: 377, SEQ ID NO: 379, SEQ ID NO: 381, SEQ ID NO: 383, SEQ ID NO: 385, SEQ ID NO: 387, SEQ ID NO: 389, SEQ ID NO: 391, SEQ ID NO: 393, SEQ ID NO: 395, SEQ ID NO: 397, SEQ ID NO: 399, SEQ ID NO: 401, SEQ ID NO: 403, SEQ ID NO: 405, SEQ ID NO: 407, SEQ ID NO: 409, SEQ ID NO: 411, SEQ ID NO: 413, SEQ ID NO: 415, SEQ ID NO: 417, SEQ ID NO: 419, SEQ ID NO: 421, SEQ ID NO: 423, SEQ ID NO: 425, SEQ ID NO: 427, SEQ ID NO: 429, SEQ ID NO: 431, SEQ ID NO: 433, SEQ ID NO: 435 or SEQ ID NO: 441, by adding for example an antisense molecule or RNAi or improving the activity of negative expression elements. This can be achieved for example through the expression of the nucleic acids of the invention or parts of it in antisense orientation or by the expression of hairpin RNAi constructs or the simultaneous expression of sense and antisense RNA for the nucleic acids of the invention. Details are described later in the description or in the examples; or
[0052] g) Increasing the biological activity of a protein or RNA leading to a dominant negative phenotype of the biological activity of the nucleic acid molecule of the invention or the protein of the invention such as a protein as depicted SEQ ID NO: 2, SEQ ID NO: 4, SEQ ID NO: 6, SEQ ID NO: 8, SEQ ID NO: 10, SEQ ID NO: 12, SEQ ID NO: 14, SEQ ID NO: 16, SEQ ID NO: 20, SEQ ID NO: 22, SEQ ID NO: 24, SEQ ID NO: 26, SEQ ID NO: 28, SEQ ID NO. 30, SEQ ID NO: 32; SEQ ID NO: 65, SEQ ID NO: 67, SEQ ID NO: 69, SEQ ID NO: 71, SEQ ID NO: 73, SEQ ID NO: 75, SEQ ID NO: 77, SEQ ID NO: 79, SEQ ID NO: 81, SEQ ID NO: 83, SEQ ID NO: 85, SEQ ID NO: 87, SEQ ID NO: 89, SEQ ID NO: 91, SEQ ID NO: 93, SEQ ID NO: 95, SEQ ID NO: 97, SEQ ID NO: 99, SEQ ID NO: 101, SEQ ID NO: 103, SEQ ID NO: 105, SEQ ID NO: 107, SEQ ID NO: 109, SEQ ID NO: 111, SEQ ID NO: 113, SEQ ID NO: 115, SEQ ID NO: 117, SEQ ID NO: 119, SEQ ID NO: 121, SEQ ID NO: 123, SEQ ID NO: 125, SEQ ID NO: 127, SEQ ID NO: 129, SEQ ID NO: 131, SEQ ID NO: 133, SEQ ID NO: 135, SEQ ID NO: 137, SEQ ID NO: 139, SEQ ID NO: 141, SEQ ID NO: 143, SEQ ID NO: 152, SEQ ID NO: 154, SEQ ID NO: 156, SEQ ID NO: 158, SEQ ID NO: 160, SEQ ID NO: 162, SEQ ID NO: 164, SEQ ID NO: 166, SEQ ID NO: 168, SEQ ID NO: 170, SEQ ID NO: 172, SEQ ID NO: 174, SEQ ID NO: 176, SEQ ID NO: 178, SEQ ID NO: 180, SEQ ID NO: 182, SEQ ID NO: 184, SEQ ID NO: 186, SEQ ID NO: 188, SEQ ID NO: 190, SEQ ID NO: 192, SEQ ID NO: 194, SEQ ID NO: 196, SEQ ID NO: 198, SEQ ID NO: 200, SEQ ID NO: 202, SEQ ID NO: 204, SEQ ID NO: 206, SEQ ID NO: 208, SEQ ID NO: 210, SEQ ID NO: 212, SEQ ID NO: 214, SEQ ID NO: 216, SEQ ID NO: 218, SEQ ID NO: 220, SEQ ID NO: 229, SEQ ID NO:231, SEQ ID NO:233, SEQ ID NO: 235, SEQ ID NO: 237, SEQ ID NO: 239, SEQ ID NO: 241, SEQ ID NO: 243, SEQ ID NO: 250, SEQ ID NO: 252, SEQ ID NO: 254, SEQ ID NO: 256, SEQ ID NO: 258, SEQ ID NO: 260, SEQ ID NO: 262, SEQ ID NO: 264, SEQ ID NO: 266, SEQ ID NO: 268, SEQ ID NO: 270, SEQ ID NO: 272, SEQ ID NO: 283, SEQ ID NO: 285, SEQ ID NO: 287, SEQ ID NO: 289, SEQ ID NO: 291, SEQ ID NO: 293, SEQ ID NO: 295, SEQ ID NO: 297, SEQ ID NO: 299, SEQ ID NO: 301, SEQ ID NO: 303, SEQ ID NO: 305, SEQ ID NO: 307, SEQ ID NO: 309, SEQ ID NO: 311, SEQ ID NO: 313, SEQ ID NO: 315, SEQ ID NO: 317, SEQ ID NO: 319, SEQ ID NO: 321, SEQ ID NO: 323, SEQ ID NO: 325, SEQ ID NO: 327, SEQ ID NO: 329, SEQ ID NO: 331, SEQ ID NO: 333, SEQ ID NO: 335, SEQ ID NO: 337, SEQ ID NO: 339, SEQ ID NO: 341, SEQ ID NO: 343, SEQ ID NO: 345, SEQ ID NO: 347, SEQ ID NO: 349, SEQ ID NO: 351, SEQ ID NO: 353, SEQ ID NO: 355, SEQ ID NO: 357, SEQ ID NO: 359, SEQ ID NO: 361, SEQ ID NO: 363, SEQ ID NO: 365, SEQ ID NO: 367, SEQ ID NO: 369, SEQ ID NO: 371, SEQ ID NO: 373, SEQ ID NO: 375, SEQ ID NO: 377, SEQ ID NO: 379, SEQ ID NO: 381, SEQ ID NO: 383, SEQ ID NO: 385, SEQ ID NO: 387, SEQ ID NO: 389, SEQ ID NO: 391, SEQ ID NO: 393, SEQ ID NO: 395, SEQ ID NO: 397, SEQ ID NO: 399, SEQ ID NO: 401, SEQ ID NO: 403, SEQ ID NO: 405, SEQ ID NO: 407, SEQ ID NO: 409, SEQ ID NO: 411, SEQ ID NO: 413, SEQ ID NO: 415, SEQ ID NO: 417, SEQ ID NO: 419, SEQ ID NO: 421, SEQ ID NO: 423, SEQ ID NO: 425, SEQ ID NO: 427, SEQ ID NO: 429, SEQ ID NO: 431, SEQ ID NO: 433, SEQ ID NO: 435 or SEQ ID NO: 441. Advantageously this can be achieved for example through the expression of the nucleic acids encoding a protein, which has lost its biological activity and which binds to another protein in a multimeric complex and thereby decreasing or delting the activity of said complex or which binds for example as a transcription factor to DNA and thereby decreasing or deleting the activity of the translated protein; or
[0053] h) expression of an antibody or aptamer, which binds to the nucleic acid molecule of the invention or the protein of the invention such as a protein as depicted SEQ ID NO: 2, SEQ ID NO: 4, SEQ ID NO: 6, SEQ ID NO: 8, SEQ ID NO: 10, SEQ ID NO: 12, SEQ ID NO: 14, SEQ ID NO: 16, SEQ ID NO: 20, SEQ ID NO: 22, SEQ ID NO: 24, SEQ ID NO: 26, SEQ ID NO: 28, SEQ ID NO. 30, SEQ ID NO: 32; SEQ ID NO: 65, SEQ ID NO: 67, SEQ ID NO: 69, SEQ ID NO: 71, SEQ ID NO: 73, SEQ ID NO: 75, SEQ ID NO: 77, SEQ ID NO: 79, SEQ ID NO: 81, SEQ ID NO: 83, SEQ ID NO: 85, SEQ ID NO: 87, SEQ ID NO: 89, SEQ ID NO: 91, SEQ ID NO: 93, SEQ ID NO: 95, SEQ ID NO: 97, SEQ ID NO: 99, SEQ ID NO: 101, SEQ ID NO: 103, SEQ ID NO: 105, SEQ ID NO: 107, SEQ ID NO: 109, SEQ ID NO: 111, SEQ ID NO: 113, SEQ ID NO: 115, SEQ ID NO: 117, SEQ ID NO: 119, SEQ ID NO: 121, SEQ ID NO: 123, SEQ ID NO: 125, SEQ ID NO: 127, SEQ ID NO: 129, SEQ ID NO: 131, SEQ ID NO: 133, SEQ ID NO: 135, SEQ ID NO: 137, SEQ ID NO: 139, SEQ ID NO: 141, SEQ ID NO: 143, SEQ ID NO: 152, SEQ ID NO: 154, SEQ ID NO: 156, SEQ ID NO: 158, SEQ ID NO: 160, SEQ ID NO: 162, SEQ ID NO: 164, SEQ ID NO: 166, SEQ ID NO: 163, SEQ ID NO: 170, SEQ ID NO: 172, SEQ ID NO: 174, SEQ ID NO: 176, SEQ ID NO: 178, SEQ ID NO: 180, SEQ ID NO: 182, SEQ ID NO: 184, SEQ ID NO: 186, SEQ ID NO: 188, SEQ ID NO: 190, SEQ ID NO: 192, SEQ ID NO: 194, SEQ ID NO: 196, SEQ ID NO: 198, SEQ ID NO: 200, SEQ ID NO: 202, SEQ ID NO: 204, SEQ ID NO: 206, SEQ ID NO: 208, SEQ ID NO: 210, SEQ ID NO: 212, SEQ ID NO: 214, SEQ ID NO: 216, SEQ ID NO: 218, SEQ ID NO: 220, SEQ ID NO: 229, SEQ ID NO:231, SEQ ID NO:233, SEQ ID NO: 235, SEQ ID NO: 237, SEQ ID NO: 239, SEQ ID NO: 241, SEQ ID NO: 243, SEQ ID NO: 250, SEQ ID NO: 252, SEQ ID NO: 254, SEQ ID NO: 256, SEQ ID NO: 258, SEQ ID NO: 260, SEQ ID NO: 262, SEQ ID NO: 264, SEQ ID NO: 266, SEQ ID NO: 268, SEQ ID NO: 270, SEQ ID NO: 272, SEQ ID NO: 283, SEQ ID NO: 285, SEQ ID NO: 287, SEQ ID NO: 289, SEQ ID NO: 291, SEQ ID NO: 293, SEQ ID NO: 295, SEQ ID NO: 297, SEQ ID NO: 299, SEQ ID NO: 301, SEQ ID NO: 303, SEQ ID NO: 305, SEQ ID NO: 307, SEQ ID NO: 309, SEQ ID NO: 311, SEQ ID NO: 313, SEQ ID NO: 315, SEQ ID NO: 317, SEQ ID NO: 319, SEQ ID NO: 321, SEQ ID NO: 323, SEQ ID NO: 325, SEQ ID NO: 327, SEQ ID NO: 329, SEQ ID NO: 331, SEQ ID NO: 333, SEQ ID NO: 335, SEQ ID NO: 337, SEQ ID NO: 339, SEQ ID NO: 341, SEQ ID NO: 343, SEQ ID NO: 345, SEQ ID NO: 347, SEQ ID NO: 349, SEQ ID NO: 351, SEQ ID NO: 353, SEQ ID NO: 355, SEQ ID NO: 357, SEQ ID NO: 359, SEQ ID NO: 361, SEQ ID NO: 363, SEQ ID NO: 365, SEQ ID NO: 367, SEQ ID NO: 369, SEQ ID NO: 371, SEQ ID NO: 373, SEQ ID NO: 375, SEQ ID NO: 377, SEQ ID NO: 379, SEQ ID NO: 381, SEQ ID NO: 383, SEQ ID NO: 385, SEQ ID NO: 387, SEQ ID NO: 389, SEQ ID NO: 391, SEQ ID NO: 393, SEQ ID NO: 395, SEQ ID NO: 397, SEQ ID NO: 399, SEQ ID NO: 401, SEQ ID NO: 403, SEQ ID NO: 405, SEQ ID NO: 407, SEQ ID NO: 409, SEQ ID NO: 411, SEQ ID NO: 413, SEQ ID NO: 415, SEQ ID NO: 417, SEQ ID NO: 419, SEQ ID NO: 421, SEQ ID NO: 423, SEQ ID NO: 425, SEQ ID NO: 427, SEQ ID NO: 429, SEQ ID NO: 431, SEQ ID NO: 433, SEQ ID NO: 435 or SEQ ID NO: 441 and thereby reducing, decreasing or deleting its biological activity; and/or
[0054] i) modulating growth conditions of an organism in such a manner, that the expression or activity of the nucleic acid molecule encoding the protein of the invention or the protein itself is reduced, decreased or deleted. This can be achieved by e.g. modulating light and/or nutrient conditions, which in terms modulated the expression of the gene or protein of the invention.

[0055] Preferably, said mRNA is one kind of the nucleic acid molecule of the present invention and/or the protein enabling the reduced or decreased expression of a protein encoded by the nucleic acid molecule of the present invention or the polypeptide having the herein mentioned biological activity of the polypeptide of the present invention, e.g. conferring the increase of production of the fine chemical after decreasing the expression or activity of the encoded polypeptide or having the biological activity of a polypeptide having the biological activity of the protein of the invention.

[0056] In general, the amount of mRNA, polynucleotide or nucleic acid molecule in a cell or a compartment of an organism correlates to the amount of encoded protein and thus with the overall activity of the encoded protein in said volume. Said correlation is not always linear, the activity in the volume is dependent on the stability of the molecules, the degradation of the molecules or the presence of activating or inhibiting co-factors. Further, product and educt inhibitions of enzymes are well known.

[0057] The activity of the abovementioned proteins and/or polypeptide encoded by the nucleic acid molecule of the present invention can be reduced, decreased or deleted in various ways. For example, the activity in an organism or in a part thereof, like a cell, is reduced or decreased via reducing or decreasing the gene product number, e.g. by reducing or decreasing the expression rate, like mutating the natural promoter to a lower activity, or by reducing or decreasing the stability of the mRNA expressed, thus reducing or decreasing the translation rate, and/or reducing or decreasing the stability of the gene product, thus increasing the proteins decay. Further, the activity or turnover of enzymes or channels or carriers, transcription factors, and similar active proteins can be influenced in such a manner that a reduction of the reaction rate or a modification (reduction, decrease or deletion) of the affinity to the substrate results, is reached. A mutation in the catalytic centre of an polypeptide of the invention, e.g. as enzyme, can modulate the turn over rate of the enzyme, e.g. a knock out of an essential amino acid can lead to a reduced or complete knock out of the activity of the enzyme, or the deletion of regulator binding sites can reduce a negative regulation like a feedback inhibition (or a substrate inhibition, if the substrate level is also increased). The specific activity of an enzyme of the present invention can be decreased such that the turn over rate is decreased or the binding of a co-factor is reduced. Reducing the stability of the encoding mRNA or the protein can also decrease the activity of a gene product. The reduction of the activity is also under the scope of the term “reduced, decreased or deleted activity”. Beside this, advantageously the reduction of the activity in cis, eg. mutating the promotor including other cis-regulatory elements, or the transcribed or coding parts of the gene, inhibition can be achieved in trans, eg. by transfactors like chimeric transcription factor, ribozymes, antisense RNAs, dsRNAs or dominant negative proteins versions, which interfere with various stages of expression, eg the transcription, the translation or the activity of the protein or protein complex itself.

[0058] In the inventive process as mentioned above preferably the reduction, decrease or deletion of the biological activity represented by protein of the invention is achieved by reducing, decreasing or delting the expression of at least one nucleic acid molecule, wherein the nucleic acid molecule is selected from the group consisting of:
[0059] a) nucleic acid molecule encoding the polypeptide shown in SEQ ID NO: 2, SEQ ID NO: 4, SEQ ID NO: 6, SEQ ID NO: 8, SEQ ID NO: 10, SEQ ID NO: 12, SEQ ID NO: 14, SEQ ID NO: 16, SEQ ID NO: 20, SEQ ID NO: 22, SEQ ID NO: 24, SEQ ID NO: 26, SEQ ID NO: 28, SEQ ID NO. 30, SEQ ID NO: 32; SEQ ID NO: 65, SEQ ID NO: 67, SEQ ID NO: 69, SEQ ID NO: 71, SEQ ID NO: 73, SEQ ID NO: 75, SEQ ID NO: 77, SEQ ID NO: 79, SEQ ID NO: 81, SEQ ID NO: 83, SEQ ID NO: 85, SEQ ID NO: 87, SEQ ID NO: 89, SEQ ID NO: 91, SEQ ID NO: 93, SEQ ID NO: 95, SEQ ID NO: 97, SEQ ID NO: 99, SEQ ID NO: 101, SEQ ID NO: 103, SEQ ID NO: 105, SEQ ID NO: 107, SEQ ID NO: 109, SEQ ID NO: 111, SEQ ID NO: 113, SEQ ID NO: 115, SEQ ID NO: 117, SEQ ID NO: 119, SEQ ID NO: 121, SEQ ID NO: 123, SEQ ID NO: 125, SEQ ID NO: 127, SEQ ID NO: 129, SEQ ID NO: 131, SEQ ID NO: 133, SEQ ID NO: 135, SEQ ID NO: 137, SEQ ID NO: 139, SEQ ID NO: 141, SEQ ID NO: 143, SEQ ID NO: 152, SEQ ID NO: 154, SEQ ID NO: 156, SEQ ID NO: 158, SEQ ID NO: 160, SEQ ID NO: 162, SEQ ID NO: 164, SEQ ID NO: 166, SEQ ID NO: 168, SEQ ID NO: 170, SEQ ID NO: 172, SEQ ID NO: 174, SEQ ID NO: 176, SEQ ID NO: 178, SEQ ID NO: 180, SEQ ID NO: 182, SEQ ID NO: 184, SEQ ID NO: 186, SEQ ID NO: 188, SEQ ID NO: 190, SEQ ID NO: 192, SEQ ID NO: 194, SEQ ID NO: 196, SEQ ID NO: 198, SEQ ID NO: 200, SEQ ID NO: 202, SEQ ID NO: 204, SEQ ID NO: 206, SEQ ID NO: 208, SEQ ID NO: 210, SEQ ID NO: 212, SEQ ID NO: 214, SEQ ID NO: 216, SEQ ID NO: 218, SEQ ID NO: 220, SEQ ID NO: 229, SEQ ID NO:231, SEQ ID NO:233, SEQ ID NO: 235, SEQ ID NO: 237, SEQ ID NO: 239, SEQ ID NO: 241, SEQ ID NO: 243, SEQ ID NO: 250, SEQ ID NO: 252, SEQ ID NO: 254, SEQ ID NO: 256, SEQ ID NO: 258, SEQ ID NO: 260, SEQ ID NO: 262, SEQ ID NO: 264, SEQ ID NO: 266, SEQ ID NO: 268, SEQ ID NO: 270, SEQ ID NO: 272, SEQ ID NO: 283, SEQ ID NO: 285, SEQ ID NO: 287, SEQ ID NO: 289, SEQ ID NO: 291, SEQ ID NO: 293, SEQ ID NO: 295, SEQ ID NO: 297, SEQ ID NO: 299, SEQ ID NO: 301, SEQ ID NO: 303, SEQ ID NO: 305, SEQ ID NO: 307, SEQ ID NO: 309, SEQ ID NO: 311, SEQ ID NO: 313, SEQ ID NO: 315, SEQ ID NO: 317, SEQ ID NO: 319, SEQ ID NO: 321, SEQ ID NO: 323, SEQ ID NO: 325, SEQ ID NO: 327, SEQ ID NO: 329, SEQ ID NO: 331, SEQ ID NO: 333, SEQ ID NO: 335, SEQ ID NO: 337, SEQ ID NO: 339, SEQ ID NO: 341, SEQ ID NO: 343, SEQ ID NO: 345, SEQ ID NO: 347, SEQ ID NO: 349, SEQ ID NO: 351, SEQ ID NO: 353, SEQ ID NO: 355, SEQ ID NO: 357, SEQ ID NO: 359, SEQ ID NO: 361, SEQ ID NO: 363, SEQ ID NO: 365, SEQ ID NO: 367, SEQ ID NO: 369, SEQ ID NO: 371, SEQ ID NO: 373, SEQ ID NO: 375, SEQ ID NO: 377, SEQ ID NO: 379, SEQ ID NO: 381, SEQ ID NO: 383, SEQ ID NO: 385, SEQ ID NO: 387, SEQ ID NO: 389, SEQ ID NO: 391, SEQ ID NO: 393, SEQ ID NO: 395, SEQ ID NO: 397, SEQ ID NO: 399, SEQ ID NO: 401, SEQ ID NO: 403, SEQ ID NO: 405, SEQ ID NO: 407, SEQ ID NO: 409, SEQ ID NO: 411, SEQ ID NO: 413, SEQ ID NO: 415, SEQ ID NO: 417, SEQ ID NO: 419, SEQ ID NO: 421, SEQ ID NO: 423, SEQ ID NO: 425, SEQ ID NO: 427, SEQ ID NO: 429, SEQ ID NO: 431, SEQ ID NO: 433, SEQ ID NO: 435 or SEQ ID NO: 441;
[0060] b) nucleic acid molecule comprising the nucleic acid molecule shown in SEQ ID NO: 1, SEQ ID NO: 3, SEQ ID NO: 5, SEQ ID NO: 7, SEQ ID NO: 9, SEQ ID NO: 11, SEQ ID NO: 13, SEQ ID NO: 15, SEQ ID NO: 19, SEQ ID NO: 21, SEQ ID NO: 23, SEQ ID NO: 25, SEQ ID NO: 27, SEQ ID NO: 29, SEQ ID NO: 31; SEQ ID NO: 64, SEQ ID NO: 66, SEQ ID NO: 68, SEQ ID NO: 70, SEQ ID NO: 72, SEQ ID NO: 74, SEQ ID NO: 76, SEQ ID NO: 78, SEQ ID NO: 80, SEQ ID NO: 82, SEQ ID NO: 84, SEQ ID NO: 86, SEQ ID NO: 88, SEQ ID NO: 90, SEQ ID NO: 92, SEQ ID NO: 94, SEQ ID NO: 96, SEQ ID NO: 98, SEQ ID NO: 100, SEQ ID NO: 102, SEQ ID NO: 104, SEQ ID NO: 106, SEQ ID NO: 108, SEQ ID NO: 110, SEQ ID NO: 112, SEQ ID NO: 114, SEQ ID NO: 116, SEQ ID NO: 118, SEQ ID NO: 120, SEQ ID NO: 122, SEQ ID NO: 124, SEQ ID NO: 126, SEQ ID NO: 128, SEQ ID NO: 130, SEQ ID NO: 132, SEQ ID NO: 134, SEQ ID NO: 136, SEQ ID NO: 138, SEQ ID NO: 140, SEQ ID NO: , SEQ ID NO: 142, SEQ ID NO: 151, SEQ ID NO: 153, SEQ ID NO: 155, SEQ ID NO: 157, SEQ ID NO: 159, SEQ ID NO: 161, SEQ ID NO: 163, SEQ ID NO: 165, SEQ ID NO: 167, SEQ ID NO: 169, SEQ ID NO: 171, SEQ ID NO: 173, SEQ ID NO: 175, SEQ ID NO: 177, SEQ ID NO: 179, SEQ ID NO: 181, SEQ ID NO: 183, SEQ ID NO: 185, SEQ ID NO: 187, SEQ ID NO: 189, SEQ ID NO: 191, SEQ ID NO: 193, SEQ ID NO: 195, SEQ ID NO: 197, SEQ ID NO: 199, SEQ ID NO: 201, SEQ ID NO: 203, SEQ ID NO: 205, SEQ ID NO: 207, SEQ ID NO: 209, SEQ ID NO: 211, SEQ ID NO: 213, SEQ ID NO: 215, SEQ ID NO: 217, SEQ ID NO: 219, SEQ ID NO: 228, SEQ ID NO: 230, SEQ ID NO: 232, SEQ ID NO: 234, SEQ ID NO: 236, SEQ ID NO: 238, SEQ ID NO: 240, SEQ ID NO: 242, SEQ ID NO: 249, SEQ ID NO: 251, SEQ ID NO: 253, SEQ ID NO: 255, SEQ ID NO: 257, SEQ ID NO: 259, SEQ ID NO: 261, SEQ ID NO: 263, SEQ ID NO: 265, SEQ ID NO: 267, SEQ ID NO: 269, SEQ ID NO: 271, SEQ ID NO: 282, SEQ ID NO: 284, SEQ ID NO: 286, SEQ ID NO: 288, SEQ ID NO: 290, SEQ ID NO: 292, SEQ ID NO: 294, SEQ ID NO: 296, SEQ ID NO: 298, SEQ ID NO: 300, SEQ ID NO: 302, SEQ ID NO: 304, SEQ ID NO: 306, SEQ ID NO: 308, SEQ ID NO: 310, SEQ ID NO: 312, SEQ ID NO: 314, SEQ ID NO: 316, SEQ ID NO: 318, SEQ ID NO: 320, SEQ ID NO: 322, SEQ ID NO: 324, SEQ ID NO: 326, SEQ ID NO: 328, SEQ ID NO: 330, SEQ ID NO: 332, SEQ ID NO: 334, SEQ ID NO: 336, SEQ ID NO: 338, SEQ ID NO: 340, SEQ ID NO: 342, SEQ ID NO: 344, SEQ ID NO: 346, SEQ ID NO: 348, SEQ ID NO: 350, SEQ ID NO: 352, SEQ ID NO: 354, SEQ ID NO: 356, SEQ ID NO: 358, SEQ ID NO: 360, SEQ ID NO: 362, SEQ ID NO: 364, SEQ ID NO: 366, SEQ ID NO: 368, SEQ ID NO: 370, SEQ ID NO: 372, SEQ ID NO: 374, SEQ ID NO: 376, SEQ ID NO: 378, SEQ ID NO: 380, SEQ ID NO: 382, SEQ ID NO: 384, SEQ ID NO: 386, SEQ ID NO: 388, SEQ ID NO: 390, SEQ ID NO: 392, SEQ ID NO: 394, SEQ ID NO: 396, SEQ ID NO: 398, SEQ ID NO: 400, SEQ ID NO: 402, SEQ ID NO: 404, SEQ ID NO: 406, SEQ ID NO: 408, SEQ ID NO: 410, SEQ ID NO: 412, SEQ ID NO: 414, SEQ ID NO: 416, SEQ ID NO: 418, SEQ ID NO: 420, SEQ ID NO: 422, SEQ ID NO: 424, SEQ ID NO: 426, SEQ ID NO: 428, SEQ ID NO: 430, SEQ ID NO: 432, SEQ ID NO: 434 or SEQ ID NO: 440;
[0061] c) nucleic acid molecule comprising a nucleic acid sequence, which, as a result of the degeneracy of the genetic code, can be derived from a polypeptide sequence depicted in SEQ ID NO: 2, SEQ ID NO: 4, SEQ ID NO: 6, SEQ ID NO: 8, SEQ ID NO: 10, SEQ ID NO: 12, SEQ ID NO: 14, SEQ ID NO: 16, SEQ ID NO: 20, SEQ ID NO: 22, SEQ ID NO: 24, SEQ ID NO: 26, SEQ ID NO: 28, SEQ ID NO. 30, SEQ ID NO: 32; SEQ ID NO: 65, SEQ ID NO: 67, SEQ ID NO: 69, SEQ ID NO: 71, SEQ ID NO: 73, SEQ ID NO: 75, SEQ ID NO: 77, SEQ ID NO: 79, SEQ ID NO: 81, SEQ ID NO: 83, SEQ ID NO: 85, SEQ ID NO: 87, SEQ ID NO: 89, SEQ ID NO: 91, SEQ ID NO: 93, SEQ ID NO: 95, SEQ ID NO: 97, SEQ ID NO: 99, SEQ ID NO: 101, SEQ ID NO: 103, SEQ ID NO: 105, SEQ ID NO: 107, SEQ ID NO: 109, SEQ ID NO: 111, SEQ ID NO: 113, SEQ ID NO: 115, SEQ ID NO: 117, SEQ ID NO: 119, SEQ ID NO: 121, SEQ ID NO: 123, SEQ ID NO: 125, SEQ ID NO: 127, SEQ ID NO: 129, SEQ ID NO: 131, SEQ ID NO: 133, SEQ ID NO: 135, SEQ ID NO: 137, SEQ ID NO: 139, SEQ ID NO: 141, SEQ ID NO: 143, SEQ ID NO: 152, SEQ ID NO: 154, SEQ ID NO: 156, SEQ ID NO: 158, SEQ ID NO: 160, SEQ ID NO: 162, SEQ ID NO: 164, SEQ ID NO: 166, SEQ ID NO: 168, SEQ ID NO: 170, SEQ ID NO: 172, SEQ ID NO: 174, SEQ ID NO: 176, SEQ ID NO: 178, SEQ ID NO: 180, SEQ ID NO: 182, SEQ ID NO: 184, SEQ ID NO: 186, SEQ ID NO: 188, SEQ ID NO: 190, SEQ ID NO: 192, SEQ ID NO: 194, SEQ ID NO: 196, SEQ ID NO: 198, SEQ ID NO: 200, SEQ ID NO: 202, SEQ ID NO: 204, SEQ ID NO: 206, SEQ ID NO: 208, SEQ ID NO: 210, SEQ ID NO: 212, SEQ ID NO: 214, SEQ ID NO: 216, SEQ ID NO: 218, SEQ ID NO: 220, SEQ ID NO: 229, SEQ ID NO:231, SEQ ID NO:233, SEQ ID NO: 235, SEQ ID NO: 237, SEQ ID NO: 239, SEQ ID NO: 241, SEQ ID NO: 243, SEQ ID NO: 250, SEQ ID NO: 252, SEQ ID NO: 254, SEQ ID NO: 256, SEQ ID NO: 258, SEQ ID NO: 260, SEQ ID NO: 262, SEQ ID NO: 264, SEQ ID NO: 266, SEQ ID NO: 268, SEQ ID NO: 270, SEQ ID NO: 272, SEQ ID NO: 283, SEQ ID NO: 285, SEQ ID NO: 287, SEQ ID NO: 289, SEQ ID NO: 291, SEQ ID NO: 293, SEQ ID NO: 295, SEQ ID NO: 297, SEQ ID NO: 299, SEQ ID NO: 301, SEQ ID NO: 303, SEQ ID NO: 305, SEQ ID NO: 307, SEQ ID NO: 309, SEQ ID NO: 311, SEQ ID NO: 313, SEQ ID NO: 315, SEQ ID NO: 317, SEQ ID NO: 319, SEQ ID NO: 321, SEQ ID NO: 323, SEQ ID NO: 325, SEQ ID NO: 327, SEQ ID NO: 329, SEQ ID NO: 331, SEQ ID NO: 333, SEQ ID NO: 335, SEQ ID NO: 337, SEQ ID NO: 339, SEQ ID NO: 341, SEQ ID NO: 343, SEQ ID NO: 345, SEQ ID NO: 347, SEQ ID NO: 349, SEQ ID NO: 351, SEQ ID NO: 353, SEQ ID NO: 355, SEQ ID NO: 357, SEQ ID NO: 359, SEQ ID NO: 361, SEQ ID NO: 363, SEQ ID NO: 365, SEQ ID NO: 367, SEQ ID NO: 369, SEQ ID NO: 371, SEQ ID NO: 373, SEQ ID NO: 375, SEQ ID NO: 377, SEQ ID NO: 379, SEQ ID NO: 381, SEQ ID NO: 383, SEQ ID NO: 385, SEQ ID NO: 387, SEQ ID NO: 389, SEQ ID NO: 391, SEQ ID NO: 393, SEQ ID NO: 395, SEQ ID NO: 397, SEQ ID NO: 399, SEQ ID NO: 401, SEQ ID NO: 403, SEQ ID NO: 405, SEQ ID NO: 407, SEQ ID NO: 409, SEQ ID NO: 411, SEQ ID NO: 413, SEQ ID NO: 415, SEQ ID NO: 417, SEQ ID NO: 419, SEQ ID NO: 421, SEQ ID NO: 423, SEQ ID NO: 425, SEQ ID NO: 427, SEQ ID NO: 429, SEQ ID NO: 431, SEQ ID NO: 433, SEQ ID NO: 435 or SEQ ID NO: 441;
[0062] d) nucleic acid molecule encoding a polypeptide having at least 50% identity with the amino acid sequence of the polypeptide encoded by the nucleic acid molecule of (a) to (c) and having the biological activity represented by protein as depicted in SEQ ID NO: 2, SEQ ID NO: 4, SEQ ID NO: 6, SEQ ID NO: 8, SEQ ID NO: 10, SEQ ID NO: 12, SEQ ID NO: 14, SEQ ID NO: 16, SEQ ID NO: 20, SEQ ID NO: 22, SEQ ID NO: 24, SEQ ID NO: 26, SEQ ID NO: 28, SEQ ID NO. 30, SEQ ID NO: 32; SEQ ID NO: 65, SEQ ID NO: 67, SEQ ID NO: 69, SEQ ID NO: 71, SEQ ID NO: 73, SEQ ID NO: 75, SEQ ID NO: 77, SEQ ID NO: 79, SEQ ID NO: 81, SEQ ID NO: 83, SEQ ID NO: 85, SEQ ID NO: 87, SEQ ID NO: 89, SEQ ID NO: 91, SEQ ID NO: 93, SEQ ID NO: 95, SEQ ID NO: 97, SEQ ID NO: 99, SEQ ID NO: 101, SEQ ID NO: 103, SEQ ID NO: 105, SEQ ID NO: 107, SEQ ID NO: 109, SEQ ID NO: 111, SEQ ID NO: 113, SEQ ID NO: 115, SEQ ID NO: 117, SEQ ID NO: 119, SEQ ID NO: 121, SEQ ID NO: 123, SEQ ID NO: 125, SEQ ID NO: 127, SEQ ID NO: 129, SEQ ID NO: 131, SEQ ID NO: 133, SEQ ID NO: 135, SEQ ID NO: 137, SEQ ID NO: 139, SEQ ID NO: 141, SEQ ID NO: 143, SEQ ID NO: 152, SEQ ID NO: 154, SEQ ID NO: 156, SEQ ID NO: 158, SEQ ID NO: 160, SEQ ID NO: 162, SEQ ID NO: 164, SEQ ID NO: 166, SEQ ID NO: 168, SEQ ID NO: 170, SEQ ID NO: 172, SEQ ID NO: 174, SEQ ID NO: 176, SEQ ID NO: 178, SEQ ID NO: 180, SEQ ID NO: 182, SEQ ID NO: 184, SEQ ID NO: 186, SEQ ID NO: 188, SEQ ID NO: 190, SEQ ID NO: 192, SEQ ID NO: 194, SEQ ID NO: 196, SEQ ID NO: 198, SEQ ID NO: 200, SEQ ID NO: 202, SEQ ID NO: 204, SEQ ID NO: 206, SEQ ID NO: 208, SEQ ID NO: 210, SEQ ID NO: 212, SEQ ID NO: 214, SEQ ID NO: 216, SEQ ID NO: 218, SEQ ID NO: 220, SEQ ID NO: 229, SEQ ID NO:231, SEQ ID NO:233, SEQ ID NO: 235, SEQ ID NO: 237, SEQ ID NO: 239, SEQ ID NO: 241, SEQ ID NO: 243, SEQ ID NO: 250, SEQ ID NO: 252, SEQ ID NO: 254, SEQ ID NO: 256, SEQ ID NO: 258, SEQ ID NO: 260, SEQ ID NO: 262, SEQ ID NO: 264, SEQ ID NO: 266, SEQ ID NO: 268, SEQ ID NO: 270, SEQ ID NO: 272, SEQ ID NO: 283, SEQ ID NO: 285, SEQ ID NO: 287, SEQ ID NO: 289, SEQ ID NO: 291, SEQ ID NO: 293, SEQ ID NO: 295, SEQ ID NO: 297, SEQ ID NO: 299, SEQ ID NO: 301, SEQ ID NO: 303, SEQ ID NO: 305, SEQ ID NO: 307, SEQ ID NO: 309, SEQ ID NO: 311, SEQ ID NO: 313, SEQ ID NO: 315, SEQ ID NO: 317, SEQ ID NO: 319, SEQ ID NO: 321, SEQ ID NO: 323, SEQ ID NO: 325, SEQ ID NO: 327, SEQ ID NO: 329, SEQ ID NO: 331, SEQ ID NO: 333, SEQ ID NO: 335, SEQ ID NO: 337, SEQ ID NO: 339, SEQ ID NO: 341, SEQ ID NO: 343, SEQ ID NO: 345, SEQ ID NO: 347, SEQ ID NO: 349, SEQ ID NO: 351, SEQ ID NO: 353, SEQ ID NO: 355, SEQ ID NO: 357, SEQ ID NO: 359, SEQ ID NO: 361, SEQ ID NO: 363, SEQ ID NO: 365, SEQ ID NO: 367, SEQ ID NO: 369, SEQ ID NO: 371, SEQ ID NO: 373, SEQ ID NO: 375, SEQ ID NO: 377, SEQ ID NO: 379, SEQ ID NO: 381, SEQ ID NO: 383, SEQ ID NO: 385, SEQ ID NO: 387, SEQ ID NO: 389, SEQ ID NO: 391, SEQ ID NO: 393, SEQ ID NO: 395, SEQ ID NO: 397, SEQ ID NO: 399, SEQ ID NO: 401, SEQ ID NO: 403, SEQ ID NO: 405, SEQ ID NO: 407, SEQ ID NO: 409, SEQ ID NO: 411, SEQ ID NO: 413, SEQ ID NO: 415, SEQ ID NO: 417, SEQ ID NO: 419, SEQ ID NO: 421, SEQ ID NO: 423, SEQ ID NO: 425, SEQ ID NO: 427, SEQ ID NO: 429, SEQ ID NO: 431, SEQ ID NO: 433, SEQ ID NO: 435 or SEQ ID NO: 441;
[0063] e) nucleic acid molecule which comprises a polynucleotide which is obtained by amplifying a cDNA library or a genomic library using the primers depicted in SEQ ID NO: 58, SEQ ID NO: 59, SEQ ID NO: 60, SEQ ID NO: 61, SEQ ID NO: 62, SEQ ID NO: 63, SEQ ID NO: 144, SEQ ID NO: 145, SEQ ID NO: 221, SEQ ID NO: 222, SEQ ID NO: 244, SEQ ID NO: 245, SEQ ID NO: 436 or SEQ ID NO: 437 and having the biological activity represented by protein as depicted in SEQ ID NO: 2, SEQ ID NO: 4, SEQ ID NO: 6, SEQ ID NO: 8, SEQ ID NO: 10, SEQ ID NO: 12, SEQ ID NO: 14, SEQ ID NO: 16, SEQ ID NO: 20, SEQ ID NO: 22, SEQ ID NO: 24, SEQ ID NO: 26, SEQ ID NO: 28, SEQ ID NO. 30, SEQ ID NO: 32; SEQ ID NO: 65, SEQ ID NO: 67, SEQ ID NO: 69, SEQ ID NO: 71, SEQ ID NO: 73, SEQ ID NO: 75, SEQ ID NO: 77, SEQ ID NO: 79, SEQ ID NO: 81, SEQ ID NO: 83, SEQ ID NO: 85, SEQ ID NO: 87, SEQ ID NO: 89, SEQ ID NO: 91, SEQ ID NO: 93, SEQ ID NO: 95, SEQ ID NO: 97, SEQ ID NO: 99, SEQ ID NO: 101, SEQ ID NO: 103, SEQ ID NO: 105, SEQ ID NO: 107, SEQ ID NO: 109, SEQ ID NO: 111, SEQ ID NO: 113, SEQ ID NO: 115, SEQ ID NO: 117, SEQ ID NO: 119, SEQ ID NO: 121, SEQ ID NO: 123, SEQ ID NO: 125, SEQ ID NO: 127, SEQ ID NO: 129, SEQ ID NO: 131, SEQ ID NO: 133, SEQ ID NO: 135, SEQ ID NO: 137, SEQ ID NO: 139, SEQ ID NO: 141, SEQ ID NO: 143, SEQ ID NO: 152, SEQ ID NO: 154, SEQ ID NO: 156, SEQ ID NO: 158, SEQ ID NO: 160, SEQ ID NO: 162, SEQ ID NO: 164, SEQ ID NO: 166, SEQ ID NO: 168, SEQ ID NO: 170, SEQ ID NO: 172, SEQ ID NO: 174, SEQ ID NO: 176, SEQ ID NO: 178, SEQ ID NO: 180, SEQ ID NO: 182, SEQ ID NO: 184, SEQ ID NO: 186, SEQ ID NO: 188, SEQ ID NO: 190, SEQ ID NO: 192, SEQ ID NO: 194, SEQ ID NO: 196, SEQ ID NO: 198, SEQ ID NO: 200, SEQ ID NO: 202, SEQ ID NO: 204, SEQ ID NO: 206, SEQ ID NO: 208, SEQ ID NO: 210, SEQ ID NO: 212, SEQ ID NO: 214, SEQ ID NO: 216, SEQ ID NO: 218, SEQ ID NO: 220, SEQ ID NO: 229, SEQ ID NO:231, SEQ ID NO:233, SEQ ID NO: 235, SEQ ID NO: 237, SEQ ID NO: 239, SEQ ID NO: 241, SEQ ID NO: 243, SEQ ID NO: 250, SEQ ID NO: 252, SEQ ID NO: 254, SEQ ID NO: 256, SEQ ID NO: 258, SEQ ID NO: 260, SEQ ID NO: 262, SEQ ID NO: 264, SEQ ID NO: 266, SEQ ID NO: 268, SEQ ID NO: 270, SEQ ID NO: 272, SEQ ID NO: 283, SEQ ID NO: 285, SEQ ID NO: 287, SEQ ID NO: 289, SEQ ID NO: 291, SEQ ID NO: 293, SEQ ID NO: 295, SEQ ID NO: 297, SEQ ID NO: 299, SEQ ID NO: 301, SEQ ID NO: 303, SEQ ID NO: 305, SEQ ID NO: 307, SEQ ID NO: 309, SEQ ID NO: 311, SEQ ID NO: 313, SEQ ID NO: 315, SEQ ID NO: 317, SEQ ID NO: 319, SEQ ID NO: 321, SEQ ID NO: 323, SEQ ID NO: 325, SEQ ID NO: 327, SEQ ID NO: 329, SEQ ID NO: 331, SEQ ID NO: 333, SEQ ID NO: 335, SEQ ID NO: 337, SEQ ID NO: 339, SEQ ID NO: 341, SEQ ID NO: 343, SEQ ID NO: 345, SEQ ID NO: 347, SEQ ID NO: 349, SEQ ID NO: 351, SEQ ID NO: 353, SEQ ID NO: 355, SEQ ID NO: 357, SEQ ID NO: 359, SEQ ID NO: 361, SEQ ID NO: 363, SEQ ID NO: 365, SEQ ID NO: 367, SEQ ID NO: 369, SEQ ID NO: 371, SEQ ID NO: 373, SEQ ID NO: 375, SEQ ID NO: 377, SEQ ID NO: 379, SEQ ID NO: 381, SEQ ID NO: 383, SEQ ID NO: 385, SEQ ID NO: 387, SEQ ID NO: 389, SEQ ID NO: 391, SEQ ID NO: 393, SEQ ID NO: 395, SEQ ID NO: 397, SEQ ID NO: 399, SEQ ID NO: 401, SEQ ID NO: 403, SEQ ID NO: 405, SEQ ID NO: 407, SEQ ID NO: 409, SEQ ID NO: 411, SEQ ID NO: 413, SEQ ID NO: 415, SEQ ID NO: 417, SEQ ID NO: 419, SEQ ID NO: 421, SEQ ID NO: 423, SEQ ID NO: 425, SEQ ID NO: 427, SEQ ID NO: 429, SEQ ID NO: 431, SEQ ID NO: 433, SEQ ID NO: 435 or SEQ ID NO: 441;
[0064] f) nucleic acid molecule encoding a polypeptide which is isolated with the aid of monoclonal or polyclonal antibodies against a polypeptide encoded by one of the nucleic acid molecules of (a) to (d or e) and having the biological activity represented by the protein as depicted in SEQ ID NO: 2, SEQ ID NO: 4, SEQ ID NO: 6, SEQ ID NO: 8, SEQ ID NO: 10, SEQ ID NO: 12, SEQ ID NO: 14, SEQ ID NO: 16, SEQ ID NO: 20, SEQ ID NO: 22, SEQ ID NO: 24, SEQ ID NO: 26, SEQ ID NO: 28, SEQ ID NO. 30, SEQ ID NO: 32; SEQ ID NO: 65, SEQ ID NO: 67, SEQ ID NO: 69, SEQ ID NO: 71, SEQ ID NO: 73, SEQ ID NO: 75, SEQ ID NO: 77, SEQ ID NO: 79, SEQ ID NO: 81, SEQ ID NO: 83, SEQ ID NO: 85, SEQ ID NO: 87, SEQ ID NO: 89, SEQ ID NO: 91, SEQ ID NO: 93, SEQ ID NO: 95, SEQ ID NO: 97, SEQ ID NO: 99, SEQ ID NO: 101, SEQ ID NO: 103, SEQ ID NO: 105, SEQ ID NO: 107, SEQ ID NO: 109, SEQ ID NO: 111, SEQ ID NO: 113, SEQ ID NO: 115, SEQ ID NO: 117, SEQ ID NO: 119, SEQ ID NO: 121, SEQ ID NO: 123, SEQ ID NO: 125, SEQ ID NO: 127, SEQ ID NO: 129, SEQ ID NO: 131, SEQ ID NO: 133, SEQ ID NO: 135, SEQ ID NO: 137, SEQ ID NO: 139, SEQ ID NO: 141, SEQ ID NO: 143, SEQ ID NO: 152, SEQ ID NO: 154, SEQ ID NO: 156, SEQ ID NO: 158, SEQ ID NO: 160, SEQ ID NO: 162, SEQ ID NO: 164, SEQ ID NO: 166, SEQ ID NO: 168, SEQ ID NO: 170, SEQ ID NO: 172, SEQ ID NO: 174, SEQ ID NO: 176, SEQ ID NO: 178, SEQ ID NO: 180, SEQ ID NO: 182, SEQ ID NO: 184, SEQ ID NO: 186, SEQ ID NO: 188, SEQ ID NO: 190, SEQ ID NO: 192, SEQ ID NO: 194, SEQ ID NO: 196, SEQ ID NO: 198, SEQ ID NO: 200, SEQ ID NO: 202, SEQ ID NO: 204, SEQ ID NO: 206, SEQ ID NO: 208, SEQ ID NO: 210, SEQ ID NO: 212, SEQ ID NO: 214, SEQ ID NO: 216, SEQ ID NO: 218, SEQ ID NO: 220, SEQ ID NO: 229, SEQ ID NO:231, SEQ ID NO:233, SEQ ID NO: 235, SEQ ID NO: 237, SEQ ID NO: 239, SEQ ID NO: 241, SEQ ID NO: 243, SEQ ID NO: 250, SEQ ID NO: 252, SEQ ID NO: 254, SEQ ID NO: 256, SEQ ID NO: 258, SEQ ID NO: 260, SEQ ID NO: 262, SEQ ID NO: 264, SEQ ID NO: 266, SEQ ID NO: 268, SEQ ID NO: 270, SEQ ID NO: 272, SEQ ID NO: 283, SEQ ID NO: 285, SEQ ID NO: 287, SEQ ID NO: 289, SEQ ID NO: 291, SEQ ID NO: 293, SEQ ID NO: 295, SEQ ID NO: 297, SEQ ID NO: 299, SEQ ID NO: 301, SEQ ID NO: 303, SEQ ID NO: 305, SEQ ID NO: 307, SEQ ID NO: 309, SEQ ID NO: 311, SEQ ID NO: 313, SEQ ID NO: 315, SEQ ID NO: 317, SEQ ID NO: 319, SEQ ID NO: 321, SEQ ID NO: 323, SEQ ID NO: 325, SEQ ID NO: 327, SEQ ID NO: 329, SEQ ID NO: 331, SEQ ID NO: 333, SEQ ID NO: 335, SEQ ID NO: 337, SEQ ID NO: 339, SEQ ID NO: 341, SEQ ID NO: 343, SEQ ID NO: 345, SEQ ID NO: 347, SEQ ID NO: 349, SEQ ID NO: 351, SEQ ID NO: 353, SEQ ID NO: 355, SEQ ID NO: 357, SEQ ID NO: 359, SEQ ID NO: 361, SEQ ID NO: 363, SEQ ID NO: 365, SEQ ID NO: 367, SEQ ID NO: 369, SEQ ID NO: 371, SEQ ID NO: 373, SEQ ID NO: 375, SEQ ID NO: 377, SEQ ID NO: 379, SEQ ID NO: 381, SEQ ID NO: 383, SEQ ID NO: 385, SEQ ID NO: 387, SEQ ID NO: 389, SEQ ID NO: 391, SEQ ID NO: 393, SEQ ID NO: 395, SEQ ID NO: 397, SEQ ID NO: 399, SEQ ID NO: 401, SEQ ID NO: 403, SEQ ID NO: 405, SEQ ID NO: 407, SEQ ID NO: 409, SEQ ID NO: 411, SEQ ID NO: 413, SEQ ID NO: 415, SEQ ID NO: 417, SEQ ID NO: 419, SEQ ID NO: 421, SEQ ID NO: 423, SEQ ID NO: 425, SEQ ID NO: 427, SEQ ID NO: 429, SEQ ID NO: 431, SEQ ID NO: 433, SEQ ID NO: 435 or SEQ ID NO: 441;
[0065] g) nucleic acid molecule encoding a polypeptide comprising the consensus sequence shown in SEQ ID NO: 33 or SEQ ID NO: 34 and having the biological activity represented by the protein as depicted in SEQ ID NO: 2, SEQ ID NO: 4, SEQ ID NO: 6, SEQ ID NO: 8, SEQ ID NO: 10, SEQ ID NO: 12, SEQ ID NO: 14, SEQ ID NO: 16, SEQ ID NO: 20, SEQ ID NO: 22, SEQ ID NO: 24, SEQ ID NO: 26, SEQ ID NO: 28, SEQ ID NO. 30, SEQ ID NO: 32; SEQ ID NO: 65, SEQ ID NO: 67, SEQ ID NO: 69, SEQ ID NO: 71, SEQ ID NO: 73, SEQ ID NO: 75, SEQ ID NO: 77, SEQ ID NO: 79, SEQ ID NO: 81, SEQ ID NO: 83, SEQ ID NO: 85, SEQ ID NO: 87, SEQ ID NO: 89, SEQ ID NO: 91, SEQ ID NO: 93, SEQ ID NO: 95, SEQ ID NO: 97, SEQ ID NO: 99, SEQ ID NO: 101, SEQ ID NO: 103, SEQ ID NO: 105, SEQ ID NO: 107, SEQ ID NO: 109, SEQ ID NO: 111, SEQ ID NO: 113, SEQ ID NO: 115, SEQ ID NO: 117, SEQ ID NO: 119, SEQ ID NO: 121, SEQ ID NO: 123, SEQ ID NO: 125, SEQ ID NO: 127, SEQ ID NO: 129, SEQ ID NO: 131, SEQ ID NO: 133, SEQ ID NO: 135, SEQ ID NO: 137, SEQ ID NO: 139, SEQ ID NO: 141, SEQ ID NO: 143, SEQ ID NO: 152, SEQ ID NO: 154, SEQ ID NO: 156, SEQ ID NO: 158, SEQ ID NO: 160, SEQ ID NO: 162, SEQ ID NO: 164, SEQ ID NO: 166, SEQ ID NO: 168, SEQ ID NO: 170, SEQ ID NO: 172, SEQ ID NO: 174, SEQ ID NO: 176, SEQ ID NO: 178, SEQ ID NO: 180, SEQ ID NO: 182, SEQ ID NO: 184, SEQ ID NO: 186, SEQ ID NO: 188, SEQ ID NO: 190, SEQ ID NO: 192, SEQ ID NO: 194, SEQ ID NO: 196, SEQ ID NO: 198, SEQ ID NO: 200, SEQ ID NO: 202, SEQ ID NO: 204, SEQ ID NO: 206, SEQ ID NO: 208, SEQ ID NO: 210, SEQ ID NO: 212, SEQ ID NO: 214, SEQ ID NO: 216, SEQ ID NO: 218, SEQ ID NO: 220, SEQ ID NO: 229, SEQ ID NO:231, SEQ ID NO:233, SEQ ID NO: 235, SEQ ID NO: 237, SEQ ID NO: 239, SEQ ID NO: 241, SEQ ID NO: 243, SEQ ID NO: 250, SEQ ID NO: 252, SEQ ID NO: 254, SEQ ID NO: 256, SEQ ID NO: 258, SEQ ID NO: 260, SEQ ID NO: 262, SEQ ID NO: 264, SEQ ID NO: 266, SEQ ID NO: 268, SEQ ID NO: 270, SEQ ID NO: 272, SEQ ID NO: 283, SEQ ID NO: 285, SEQ ID NO: 287, SEQ ID NO: 289, SEQ ID NO: 291, SEQ ID NO: 293, SEQ ID NO: 295, SEQ ID NO: 297, SEQ ID NO: 299, SEQ ID NO: 301, SEQ ID NO: 303, SEQ ID NO: 305, SEQ ID NO: 307, SEQ ID NO: 309, SEQ ID NO: 311, SEQ ID NO: 313, SEQ ID NO: 315, SEQ ID NO: 317, SEQ ID NO: 319, SEQ ID NO: 321, SEQ ID NO: 323, SEQ ID NO: 325, SEQ ID NO: 327, SEQ ID NO: 329, SEQ ID NO: 331, SEQ ID NO: 333, SEQ ID NO: 335, SEQ ID NO: 337, SEQ ID NO: 339, SEQ ID NO: 341, SEQ ID NO: 343, SEQ ID NO: 345, SEQ ID NO: 347, SEQ ID NO: 349, SEQ ID NO: 351, SEQ ID NO: 353, SEQ ID NO: 355, SEQ ID NO: 357, SEQ ID NO: 359, SEQ ID NO: 361, SEQ ID NO: 363, SEQ ID NO: 365, SEQ ID NO: 367, SEQ ID NO: 369, SEQ ID NO: 371, SEQ ID NO: 373, SEQ ID NO: 375, SEQ ID NO: 377, SEQ ID NO: 379, SEQ ID NO: 381, SEQ ID NO: 383, SEQ ID NO: 385, SEQ ID NO: 387, SEQ ID NO: 389, SEQ ID NO: 391, SEQ ID NO: 393, SEQ ID NO: 395, SEQ ID NO: 397, SEQ ID NO: 399, SEQ ID NO: 401, SEQ ID NO: 403, SEQ ID NO: 405, SEQ ID NO: 407, SEQ ID NO: 409, SEQ ID NO: 411, SEQ ID NO: 413, SEQ ID NO: 415, SEQ ID NO: 417, SEQ ID NO: 419, SEQ ID NO: 421, SEQ ID NO: 423, SEQ ID NO: 425, SEQ ID NO: 427, SEQ ID NO: 429, SEQ ID NO: 431, SEQ ID NO: 433, SEQ ID NO: 435 or SEQ ID NO: 441;
[0066] h) nucleic acid molecule encoding a polypeptide having the biological activity represented by the protein as depicted in SEQ ID NO: 2, SEQ ID NO: 4, SEQ ID NO: 6, SEQ ID NO: 8, SEQ ID NO: 10, SEQ ID NO: 12, SEQ ID NO: 14, SEQ ID NO: 16, SEQ ID NO: 20, SEQ ID NO: 22, SEQ ID NO: 24, SEQ ID NO: 26, SEQ ID NO: 28, SEQ ID NO. 30, SEQ ID NO: 32; SEQ ID NO: 65, SEQ ID NO: 67, SEQ ID NO: 69, SEQ ID NO: 71, SEQ ID NO: 73, SEQ ID NO: 75, SEQ ID NO: 77, SEQ ID NO: 79, SEQ ID NO: 81, SEQ ID NO: 83, SEQ ID NO: 85, SEQ ID NO: 87, SEQ ID NO: 89, SEQ ID NO: 91, SEQ ID NO: 93, SEQ ID NO: 95, SEQ ID NO: 97, SEQ ID NO: 99, SEQ ID NO: 101, SEQ ID NO: 103, SEQ ID NO: 105, SEQ ID NO: 107, SEQ ID NO: 109, SEQ ID NO: 111, SEQ ID NO: 113, SEQ ID NO: 115, SEQ ID NO: 117, SEQ ID NO: 119, SEQ ID NO: 121, SEQ ID NO: 123, SEQ ID NO: 125, SEQ ID NO: 127, SEQ ID NO: 129, SEQ ID NO: 131, SEQ ID NO: 133, SEQ ID NO: 135, SEQ ID NO: 137, SEQ ID NO: 139, SEQ ID NO: 141, SEQ ID NO: 143, SEQ ID NO: 152, SEQ ID NO: 154, SEQ ID NO: 156, SEQ ID NO: 158, SEQ ID NO: 160, SEQ ID NO: 162, SEQ ID NO: 164, SEQ ID NO: 166, SEQ ID NO: 168, SEQ ID NO: 170, SEQ ID NO: 172, SEQ ID NO: 174, SEQ ID NO: 176, SEQ ID NO: 178, SEQ ID NO: 180, SEQ ID NO: 182, SEQ ID NO: 184, SEQ ID NO: 186, SEQ ID NO: 188, SEQ ID NO: 190, SEQ ID NO: 192, SEQ ID NO: 194, SEQ ID NO: 196, SEQ ID NO: 198, SEQ ID NO: 200, SEQ ID NO: 202, SEQ ID NO: 204, SEQ ID NO: 206, SEQ ID NO: 208, SEQ ID NO: 210, SEQ ID NO: 212, SEQ ID NO: 214, SEQ ID NO: 216, SEQ ID NO: 218, SEQ ID NO: 220, SEQ ID NO: 229, SEQ ID NO:231, SEQ ID NO:233, SEQ ID NO: 235, SEQ ID NO: 237, SEQ ID NO: 239, SEQ ID NO: 241, SEQ ID NO: 243, SEQ ID NO: 250, SEQ ID NO: 252, SEQ ID NO: 254, SEQ ID NO: 256, SEQ ID NO: 258, SEQ ID NO: 260, SEQ ID NO: 262, SEQ ID NO: 264, SEQ ID NO: 266, SEQ ID NO: 268, SEQ ID NO: 270, SEQ ID NO: 272, SEQ ID NO: 283, SEQ ID NO: 285, SEQ ID NO: 287, SEQ ID NO: 289, SEQ ID NO: 291, SEQ ID NO: 293, SEQ ID NO: 295, SEQ ID NO: 297, SEQ ID NO: 299, SEQ ID NO: 301, SEQ ID NO: 303, SEQ ID NO: 305, SEQ ID NO: 307, SEQ ID NO: 309, SEQ ID NO: 311, SEQ ID NO: 313, SEQ ID NO: 315, SEQ ID NO: 317, SEQ ID NO: 319, SEQ ID NO: 321, SEQ ID NO: 323, SEQ ID NO: 325, SEQ ID NO: 327, SEQ ID NO: 329, SEQ ID NO: 331, SEQ ID NO: 333, SEQ ID NO: 335, SEQ ID NO: 337, SEQ ID NO: 339, SEQ ID NO: 341, SEQ ID NO: 343, SEQ ID NO: 345, SEQ ID NO: 347, SEQ ID NO: 349, SEQ ID NO: 351, SEQ ID NO: 353, SEQ ID NO: 355, SEQ ID NO: 357, SEQ ID NO: 359, SEQ ID NO: 361, SEQ ID NO: 363, SEQ ID NO: 365, SEQ ID NO: 367, SEQ ID NO: 369, SEQ ID NO: 371, SEQ ID NO: 373, SEQ ID NO: 375, SEQ ID NO: 377, SEQ ID NO: 379, SEQ ID NO: 381, SEQ ID NO: 383, SEQ ID NO: 385, SEQ ID NO: 387, SEQ ID NO: 389, SEQ ID NO: 391, SEQ ID NO: 393, SEQ ID NO: 395, SEQ ID NO: 397, SEQ ID NO: 399, SEQ ID NO: 401, SEQ ID NO: 403, SEQ ID NO: 405, SEQ ID NO: 407, SEQ ID NO: 409, SEQ ID NO: 411, SEQ ID NO: 413, SEQ ID NO: 415, SEQ ID NO: 417, SEQ ID NO: 419, SEQ ID NO: 421, SEQ ID NO: 423, SEQ ID NO: 425, SEQ ID NO: 427, SEQ ID NO: 429, SEQ ID NO: 431, SEQ ID NO: 433, SEQ ID NO: 435 or SEQ ID NO: 441;
[0067] i) nucleic acid molecule which is obtainable by screening a suitable nucleic acid library under stringent hybridisation conditions with a probe comprising one of the sequences of the nucleic acid molecule of (a) or (b) or with a fragment thereof having at least 15 nt, preferably 20 nt, 30 nt, 50 nt, 100 nt, 200 nt or 500 nt of the nucleic acid molecule characterized in (a) to (c) and encoding a polypeptide having the biological activity represented by protein of the invention or which comprises a sequence which is complementary thereto.

[0068] Moreover, the regulation of the abovementioned nucleic acid sequences may be modified so that gene expression is decreased. This reduction, decrease or deletion (reduction, decrease, deletion, inactivation or down-regulation shall be used as synonyms throughout the specification) can be achieved as mentioned above by all methods known to the skilled person, preferably by double-stranded RNA interference (dsRNAi), introduction of an antisense nucleic acid, a ribozyme, an antisense nucleic acid combined with a ribozyme, a nucleic acid encoding a co-suppressor, a nucleic acid encoding a dominant negative protein, DNA- or protein-binding factors targeting said gene or -RNA or -proteins, RNA degradation inducing viral nucleic acids and expression systems, systems for inducing a homolog recombination of said genes, mutations in said genes or a combination of the above.

[0069] In general, an activity of a gene product in an organism or part thereof, in particular in a plant cell, a plant, or a plant tissue or a part thereof or in a microorganism can be decreased by decreasing the amount of the specific encoding mRNA or the corresponding protein in said organism or part thereof. “amount of protein or mRNA” is understood as meaning the molecule number of polypeptides or mRNA molecules in an organism, a tissue, a cell or a cell compartment. “Decrease” in the amount of a protein means the quantitative decrease of the molecule number of said protein in an organism, a tissue, a cell or a cell compartment or part thereof—for example by one of the methods described herein below—in comparison to a wild type, control or reference.

[0070] In this context, inactivation means that the enzymatic or biological activity of the polypeptides encoded is no longer detectable in the organism or in the cell such as, for example, within the plant or plant cell. For the purposes of the invention, downregulation (=reduction) means that the enzymatic or biological activity of the polypeptides encoded is partly or essentially completely reduced in comparison with the activity of the untreated organism. This can be achieved by different cell-biological mechanisms. In this context, the activity can be downregulated in the entire organism or, in the case of multi-celled organisms, in individual parts of the organism, in the case of plants for example in tissues such as the seed, the leaf, the root or other parts. In this context, the enzymatic activity or biological activity is reduced by at least 10%, advantageously at least 20%, preferably at least 30%, especially preferably at least 40%, 50% or 60%, very especially preferably at least 70%, 80%, 85% or 90% or more, very especially preferably are at least 95%, more preferably are at least 99% or more in comparison to the control, reference or wild type. Most preferably the reduction, decrease or deletion in activity amounts to 100%.

[0071] Various strategies for reducing the quantity, the expression, the activity or the function of proteins encoded by the nucleic acids or the nucleic acid sequences itself according to the invention are encompassed in accordance with the invention. The skilled worker will recognize that a series of different methods are available for influencing the quantity of a protein, the activity or the function in the desired manner.

[0072] The term “biological activity” means the biological function of the protein of the invention. In contrast to the term “biological activity” the term “activity” means the increase in the production of the compound produced by the inventive process. The term “biological activity” preferably refers to for example the enzymatic function, transporter or carrier function, DNA-packaging function, heat shock protein function, recombination protein function or regulatory function of a peptide or protein in an organism, a tissue, a cell or a cell compartment. Suitable substrates are low-molecular-weight compounds and also the protein interaction partners of a protein. The term “reduction” of the biological function refers, for example, to the quantitative reduction in binding capacity or binding strength of a protein for at least one substrate in an organism, a tissue, a cell or a cell compartment—for example by one of the methods described herein below—in comparison with the Wild type of the same genus and species to which this method has not been applied, under otherwise identical conditions (such as, for example, culture conditions, age of the plants and the like). Reduction is also understood as meaning the modification of the substrate specificity as can be expressed for example, by the kcat/Km value. In this context, a reduction of the function of at least 10%, advantageously of at least 20%, preferably at least 30%, especially preferably of at least 40%, 50% or 60%, very especially preferably of at least 70%, 80%, 90% or 95%, in comparison with the untreated organism is advantageous. A particularly advantageous embodiment is the inactivation of the function. Binding partners for the protein can be identified in the manner with which the skilled worker is familiar, for example by the yeast 2-hybrid system.

[0073] A modification, i.e. a decrease, can be caused by endogenous or exogenous factors. For example, a decrease in activity in an organism or a part thereof can be caused by adding a chemical compound such as an antagonist to the media, nutrition, soil of the plants or to the plants themselves.

[0074] In one embodiment the increase in the fine chemical can be achieved by decreasing the endogenous level of the polypeptide of the invention. Accordingly, in an embodiment of the present invention, the present invention relates to a process, wherein the gene copy number of a gene encoding the polynucleotide or nucleic acid molecule of the invention is decreased. Further, the endogenous level of the polypeptide of the invention can for example be decreased by modifying the transcriptional or translational regulation of the polypeptide.

[0075] A further embodiment of the inventive process is a process, whereby the reduction or deletion of the biological activity represented by the protein used in the inventive process is achieved by a process comprising a step selected from the group consisting of:
[0076] (a) introducing of a nucleic acid molecule encoding a ribonucleic acid sequence, which are able to form double-stranded ribonucleic acid molecules, whereby the sense strand of said double-stranded ribonucleic acid molecules has a homology of at least 30% to a nucleic acid molecule conferring the expression of or encoding a protein having the biological activity of the protein as depicted in SEQ ID NO: 2, SEQ ID NO: 4, SEQ ID NO: 6, SEQ ID NO: 8, SEQ ID NO: 10, SEQ ID NO: 12, SEQ ID NO: 14, SEQ ID NO: 16, SEQ ID NO: 20, SEQ ID NO: 22, SEQ ID NO: 24, SEQ ID NO: 26, SEQ ID NO: 28, SEQ ID NO. 30, SEQ ID NO: 32; SEQ ID NO: 65, SEQ ID NO: 67, SEQ ID NO: 69, SEQ ID NO: 71, SEQ ID NO: 73, SEQ ID NO: 75, SEQ ID NO: 77, SEQ ID NO: 79, SEQ ID NO: 81, SEQ ID NO: 83, SEQ ID NO: 85, SEQ ID NO: 87, SEQ ID NO: 89, SEQ ID NO: 91, SEQ ID NO: 93, SEQ ID NO: 95, SEQ ID NO: 97, SEQ ID NO: 99, SEQ ID NO: 101, SEQ ID NO: 103, SEQ ID NO: 105, SEQ ID NO: 107, SEQ ID NO: 109, SEQ ID NO: 111, SEQ ID NO: 113, SEQ ID NO: 115, SEQ ID NO: 117, SEQ ID NO: 119, SEQ ID NO: 121, SEQ ID NO: 123, SEQ ID NO: 125, SEQ ID NO: 127, SEQ ID NO: 129, SEQ ID NO: 131, SEQ ID NO: 133, SEQ ID NO: 135, SEQ ID NO: 137, SEQ ID NO: 139, SEQ ID NO: 141, SEQ ID NO: 143, SEQ ID NO: 152, SEQ ID NO: 154, SEQ ID NO: 156, SEQ ID NO: 158, SEQ ID NO: 160, SEQ ID NO: 162, SEQ ID NO: 164, SEQ ID NO: 166, SEQ ID NO: 168, SEQ ID NO: 170, SEQ ID NO: 172, SEQ ID NO: 174, SEQ ID NO: 176, SEQ ID NO: 178, SEQ ID NO: 180, SEQ ID NO: 182, SEQ ID NO: 184, SEQ ID NO: 186, SEQ ID NO: 188, SEQ ID NO: 190, SEQ ID NO: 192, SEQ ID NO: 194, SEQ ID NO: 196, SEQ ID NO: 198, SEQ ID NO: 200, SEQ ID NO: 202, SEQ ID NO: 204, SEQ ID NO: 206, SEQ ID NO: 208, SEQ ID NO: 210, SEQ ID NO: 212, SEQ ID NO: 214, SEQ ID NO: 216, SEQ ID NO: 218, SEQ ID NO: 220, SEQ ID NO: 229, SEQ ID NO:231, SEQ ID NO:233, SEQ ID NO: 235, SEQ ID NO: 237, SEQ ID NO: 239, SEQ ID NO: 241, SEQ ID NO: 243, SEQ ID NO: 250, SEQ ID NO: 252, SEQ ID NO: 254, SEQ ID NO: 256, SEQ ID NO: 258, SEQ ID NO: 260, SEQ ID NO: 262, SEQ ID NO: 264, SEQ ID NO: 266, SEQ ID NO: 268, SEQ ID NO: 270, SEQ ID NO: 272, SEQ ID NO: 283, SEQ ID NO: 285, SEQ ID NO: 287, SEQ ID NO: 289, SEQ ID NO: 291, SEQ ID NO: 293, SEQ ID NO: 295, SEQ ID NO: 297, SEQ ID NO: 299, SEQ ID NO: 301, SEQ ID NO: 303, SEQ ID NO: 305, SEQ ID NO: 307, SEQ ID NO: 309, SEQ ID NO: 311, SEQ ID NO: 313, SEQ ID NO: 315, SEQ ID NO: 317, SEQ ID NO: 319, SEQ ID NO: 321, SEQ ID NO: 323, SEQ ID NO: 325, SEQ ID NO: 327, SEQ ID NO: 329, SEQ ID NO: 331, SEQ ID NO: 333, SEQ ID NO: 335, SEQ ID NO: 337, SEQ ID NO: 339, SEQ ID NO: 341, SEQ ID NO: 343, SEQ ID NO: 345, SEQ ID NO: 347, SEQ ID NO: 349, SEQ ID NO: 351, SEQ ID NO: 353, SEQ ID NO: 355, SEQ ID NO: 357, SEQ ID NO: 359, SEQ ID NO: 361, SEQ ID NO: 363, SEQ ID NO: 365, SEQ ID NO: 367, SEQ ID NO: 369, SEQ ID NO: 371, SEQ ID NO: 373, SEQ ID NO: 375, SEQ ID NO: 377, SEQ ID NO: 379, SEQ ID NO: 381, SEQ ID NO: 383, SEQ ID NO: 385, SEQ ID NO: 387, SEQ ID NO: 389, SEQ ID NO: 391, SEQ ID NO: 393, SEQ ID NO: 395, SEQ ID NO: 397, SEQ ID NO: 399, SEQ ID NO: 401, SEQ ID NO: 403, SEQ ID NO: 405, SEQ ID NO: 407, SEQ ID NO: 409, SEQ ID NO: 411, SEQ ID NO: 413, SEQ ID NO: 415, SEQ ID NO: 417, SEQ ID NO: 419, SEQ ID NO: 421, SEQ ID NO: 423, SEQ ID NO: 425, SEQ ID NO: 427, SEQ ID NO: 429, SEQ ID NO: 431, SEQ ID NO: 433, SEQ ID NO: 435 or SEQ ID NO: 441 or comprising a fragment of at least 17, 18, 19, 20, 21, 22, 23, 24 or 25 base pairs of a nucleic acid molecule with a homology of at least 50% to a nucleic acid molecule conferring the expression of a protein having the biological activity of the protein as depicted in SEQ ID NO: 2, SEQ ID NO: 4, SEQ ID NO: 6, SEQ ID NO: 8, SEQ ID NO: 10, SEQ ID NO: 12, SEQ ID NO: 14, SEQ ID NO: 16, SEQ ID NO: 20, SEQ ID NO: 22, SEQ ID NO: 24, SEQ ID NO: 26, SEQ ID NO: 28, SEQ ID NO. 30, SEQ ID NO: 32; SEQ ID NO: 65, SEQ ID NO: 67, SEQ ID NO: 69, SEQ ID NO: 71, SEQ ID NO: 73, SEQ ID NO: 75, SEQ ID NO: 77, SEQ ID NO: 79, SEQ ID NO: 81, SEQ ID NO: 83, SEQ ID NO: 85, SEQ ID NO: 87, SEQ ID NO: 89, SEQ ID NO: 91, SEQ ID NO: 93, SEQ ID NO: 95, SEQ ID NO: 97, SEQ ID NO: 99, SEQ ID NO: 101, SEQ ID NO: 103, SEQ ID NO: 105, SEQ ID NO: 107, SEQ ID NO: 109, SEQ ID NO: 111, SEQ ID NO: 113, SEQ ID NO: 115, SEQ ID NO: 117, SEQ ID NO: 119, SEQ ID NO: 121, SEQ ID NO: 123, SEQ ID NO: 125, SEQ ID NO: 127, SEQ ID NO: 129, SEQ ID NO: 131, SEQ ID NO: 133, SEQ ID NO: 135, SEQ ID NO: 137, SEQ ID NO: 139, SEQ ID NO: 141, SEQ ID NO: 143, SEQ ID NO: 152, SEQ ID NO: 154, SEQ ID NO: 156, SEQ ID NO: 158, SEQ ID NO: 160, SEQ ID NO: 162, SEQ ID NO: 164, SEQ ID NO: 166, SEQ ID NO: 168, SEQ ID NO: 170, SEQ ID NO: 172, SEQ ID NO: 174, SEQ ID NO: 176, SEQ ID NO: 178, SEQ ID NO: 180, SEQ ID NO: 182, SEQ ID NO: 184, SEQ ID NO: 186, SEQ ID NO: 188, SEQ ID NO: 190, SEQ ID NO: 192, SEQ ID NO: 194, SEQ ID NO: 196, SEQ ID NO: 198, SEQ ID NO: 200, SEQ ID NO: 202, SEQ ID NO: 204, SEQ ID NO: 206, SEQ ID NO: 208, SEQ ID NO: 210, SEQ ID NO: 212, SEQ ID NO: 214, SEQ ID NO: 216, SEQ ID NO: 218, SEQ ID NO: 220, SEQ ID NO: 229, SEQ ID NO:231, SEQ ID NO:233, SEQ ID NO: 235, SEQ ID NO: 237, SEQ ID NO: 239, SEQ ID NO: 241, SEQ ID NO: 243, SEQ ID NO: 250, SEQ ID NO: 252, SEQ ID NO: 254, SEQ ID NO: 256, SEQ ID NO: 258, SEQ ID NO: 260, SEQ ID NO: 262, SEQ ID NO: 264, SEQ ID NO: 266, SEQ ID NO: 268, SEQ ID NO: 270, SEQ ID NO: 272, SEQ ID NO: 283, SEQ ID NO: 285, SEQ ID NO: 287, SEQ ID NO: 289, SEQ ID NO: 291, SEQ ID NO: 293, SEQ ID NO: 295, SEQ ID NO: 297, SEQ ID NO: 299, SEQ ID NO: 301, SEQ ID NO: 303, SEQ ID NO: 305, SEQ ID NO: 307, SEQ ID NO: 309, SEQ ID NO: 311, SEQ ID NO: 313, SEQ ID NO: 315, SEQ ID NO: 317, SEQ ID NO: 319, SEQ ID NO: 321, SEQ ID NO: 323, SEQ ID NO: 325, SEQ ID NO: 327, SEQ ID NO: 329, SEQ ID NO: 331, SEQ ID NO: 333, SEQ ID NO: 335, SEQ ID NO: 337, SEQ ID NO: 339, SEQ ID NO: 341, SEQ ID NO: 343, SEQ ID NO: 345, SEQ ID NO: 347, SEQ ID NO: 349, SEQ ID NO: 351, SEQ ID NO: 353, SEQ ID NO: 355, SEQ ID NO: 357, SEQ ID NO: 359, SEQ ID NO: 361, SEQ ID NO: 363, SEQ ID NO: 365, SEQ ID NO: 367, SEQ ID NO: 369, SEQ ID NO: 371, SEQ ID NO: 373, SEQ ID NO: 375, SEQ ID NO: 377, SEQ ID NO: 379, SEQ ID NO: 381, SEQ ID NO: 383, SEQ ID NO: 385, SEQ ID NO: 387, SEQ ID NO: 389, SEQ ID NO: 391, SEQ ID NO: 393, SEQ ID NO: 395, SEQ ID NO: 397, SEQ ID NO: 399, SEQ ID NO: 401, SEQ ID NO: 403, SEQ ID NO: 405, SEQ ID NO: 407, SEQ ID NO: 409, SEQ ID NO: 411, SEQ ID NO: 413, SEQ ID NO: 415, SEQ ID NO: 417, SEQ ID NO: 419, SEQ ID NO: 421, SEQ ID NO: 423, SEQ ID NO: 425, SEQ ID NO: 427, SEQ ID NO: 429, SEQ ID NO: 431, SEQ ID NO: 433, SEQ ID NO: 435 or SEQ ID NO: 441;
[0077] (b) introducing an antisense nucleic acid molecule, whereby the antisense nucleic acid molecule has a homology of at least 30% to a nucleic acid molecule antisense to a nucleic acid molecule encoding a protein having the biological activity of the protein as depicted in SEQ ID NO: 2, SEQ ID NO: 4, SEQ ID NO: 6, SEQ ID NO: 8, SEQ ID NO: 10, SEQ ID NO: 12, SEQ ID NO: 14, SEQ ID NO: 16, SEQ ID NO: 20, SEQ ID NO: 22, SEQ ID NO: 24, SEQ ID NO: 26, SEQ ID NO: 28, SEQ ID NO. 30, SEQ ID NO: 32; SEQ ID NO: 65, SEQ ID NO: 67, SEQ ID NO: 69, SEQ ID NO: 71, SEQ ID NO: 73, SEQ ID NO: 75, SEQ ID NO: 77, SEQ ID NO: 79, SEQ ID NO: 81, SEQ ID NO: 83, SEQ ID NO: 85, SEQ ID NO: 87, SEQ ID NO: 89, SEQ ID NO: 91, SEQ ID NO: 93, SEQ ID NO: 95, SEQ ID NO: 97, SEQ ID NO: 99, SEQ ID NO: 101, SEQ ID NO: 103, SEQ ID NO: 105, SEQ ID NO: 107, SEQ ID NO: 109, SEQ ID NO: 111, SEQ ID NO: 113, SEQ ID NO: 115, SEQ ID NO: 117, SEQ ID NO: 119, SEQ ID NO: 121, SEQ ID NO: 123, SEQ ID NO: 125, SEQ ID NO: 127, SEQ ID NO: 129, SEQ ID NO: 131, SEQ ID NO: 133, SEQ ID NO: 135, SEQ ID NO: 137, SEQ ID NO: 139, SEQ ID NO: 141, SEQ ID NO: 143, SEQ ID NO: 152, SEQ ID NO: 154, SEQ ID NO: 156, SEQ ID NO: 158, SEQ ID NO: 160, SEQ ID NO: 162, SEQ ID NO: 164, SEQ ID NO: 166, SEQ ID NO: 168, SEQ ID NO: 170, SEQ ID NO: 172, SEQ ID NO: 174, SEQ ID NO: 176, SEQ ID NO: 178, SEQ ID NO: 180, SEQ ID NO: 182, SEQ ID NO: 184, SEQ ID NO: 186, SEQ ID NO: 188, SEQ ID NO: 190, SEQ ID NO: 192, SEQ ID NO: 194, SEQ ID NO: 196, SEQ ID NO: 198, SEQ ID NO: 200, SEQ ID NO: 202, SEQ ID NO: 204, SEQ ID NO: 206, SEQ ID NO: 208, SEQ ID NO: 210, SEQ ID NO: 212, SEQ ID NO: 214, SEQ ID NO: 216, SEQ ID NO: 218, SEQ ID NO: 220, SEQ ID NO: 229, SEQ ID NO:231, SEQ ID NO:233, SEQ ID NO: 235, SEQ ID NO: 237, SEQ ID NO: 239, SEQ ID NO: 241, SEQ ID NO: 243, SEQ ID NO: 250, SEQ ID NO: 252, SEQ ID NO: 254, SEQ ID NO: 256, SEQ ID NO: 258, SEQ ID NO: 260, SEQ ID NO: 262, SEQ ID NO: 264, SEQ ID NO: 266, SEQ ID NO: 268, SEQ ID NO: 270, SEQ ID NO: 272, SEQ ID NO: 283, SEQ ID NO: 285, SEQ ID NO: 287, SEQ ID NO: 289, SEQ ID NO: 291, SEQ ID NO: 293, SEQ ID NO: 295, SEQ ID NO: 297, SEQ ID NO: 299, SEQ ID NO: 301, SEQ ID NO: 303, SEQ ID NO: 305, SEQ ID NO: 307, SEQ ID NO: 309, SEQ ID NO: 311, SEQ ID NO: 313, SEQ ID NO: 315, SEQ ID NO: 317, SEQ ID NO: 319, SEQ ID NO: 321, SEQ ID NO: 323, SEQ ID NO: 325, SEQ ID NO: 327, SEQ ID NO: 329, SEQ ID NO: 331, SEQ ID NO: 333, SEQ ID NO: 335, SEQ ID NO: 337, SEQ ID NO: 339, SEQ ID NO: 341, SEQ ID NO: 343, SEQ ID NO: 345, SEQ ID NO: 347, SEQ ID NO: 349, SEQ ID NO: 351, SEQ ID NO: 353, SEQ ID NO: 355, SEQ ID NO: 357, SEQ ID NO: 359, SEQ ID NO: 361, SEQ ID NO: 363, SEQ ID NO: 365, SEQ ID NO: 367, SEQ ID NO: 369, SEQ ID NO: 371, SEQ ID NO: 373, SEQ ID NO: 375, SEQ ID NO: 377, SEQ ID NO: 379, SEQ ID NO: 381, SEQ ID NO: 383, SEQ ID NO: 385, SEQ ID NO: 387, SEQ ID NO: 389, SEQ ID NO: 391, SEQ ID NO: 393, SEQ ID NO: 395, SEQ ID NO: 397, SEQ ID NO: 399, SEQ ID NO: 401, SEQ ID NO: 403, SEQ ID NO: 405, SEQ ID NO: 407, SEQ ID NO: 409, SEQ ID NO: 411, SEQ ID NO: 413, SEQ ID NO: 415, SEQ ID NO: 417, SEQ ID NO: 419, SEQ ID NO: 421, SEQ ID NO: 423, SEQ ID NO: 425, SEQ ID NO: 427, SEQ ID NO: 429, SEQ ID NO: 431, SEQ ID NO: 433, SEQ ID NO: 435 or SEQ ID NO: 441 or conferring the expression of a protein having the biological activity of a protein having the biological activity of the protein as depicted in SEQ ID NO: 2, SEQ ID NO: 4, SEQ ID NO: 6, SEQ ID NO: 8, SEQ ID NO: 10, SEQ ID NO: 12, SEQ ID NO: 14, SEQ ID NO: 16, SEQ ID NO: 20, SEQ ID NO: 22, SEQ ID NO: 24, SEQ ID NO: 26, SEQ ID NO: 28, SEQ ID NO. 30, SEQ ID NO: 32; SEQ ID NO: 65, SEQ ID NO: 67, SEQ ID NO: 69, SEQ ID NO: 71, SEQ ID NO: 73, SEQ ID NO: 75, SEQ ID NO: 77, SEQ ID NO: 79, SEQ ID NO: 81, SEQ ID NO: 83, SEQ ID NO: 85, SEQ ID NO: 87, SEQ ID NO: 89, SEQ ID NO: 91, SEQ ID NO: 93, SEQ ID NO: 95, SEQ ID NO: 97, SEQ ID NO: 99, SEQ ID NO: 101, SEQ ID NO: 103, SEQ ID NO: 105, SEQ ID NO: 107, SEQ ID NO: 109, SEQ ID NO: 111, SEQ ID NO: 113, SEQ ID NO: 115, SEQ ID NO: 117, SEQ ID NO: 119, SEQ ID NO: 121, SEQ ID NO: 123, SEQ ID NO: 125, SEQ ID NO: 127, SEQ ID NO: 129, SEQ ID NO: 131, SEQ ID NO: 133, SEQ ID NO: 135, SEQ ID NO: 137, SEQ ID NO: 139, SEQ ID NO: 141, SEQ ID NO: 143, SEQ ID NO: 152, SEQ ID NO: 154, SEQ ID NO: 156, SEQ ID NO: 158, SEQ ID NO: 160, SEQ ID NO: 162, SEQ ID NO: 164, SEQ ID NO: 166, SEQ ID NO: 168, SEQ ID NO: 170, SEQ ID NO: 172, SEQ ID NO: 174, SEQ ID NO: 176, SEQ ID NO: 178, SEQ ID NO: 180, SEQ ID NO: 182, SEQ ID NO: 184, SEQ ID NO: 186, SEQ ID NO: 188, SEQ ID NO: 190, SEQ ID NO: 192, SEQ ID NO: 194, SEQ ID NO: 196, SEQ ID NO: 198, SEQ ID NO: 200, SEQ ID NO: 202, SEQ ID NO: 204, SEQ ID NO: 206, SEQ ID NO: 208, SEQ ID NO: 210, SEQ ID NO: 212, SEQ ID NO: 214, SEQ ID NO: 216, SEQ ID NO: 218, SEQ ID NO: 220, SEQ ID NO: 229, SEQ ID NO:231, SEQ ID NO:233, SEQ ID NO: 235, SEQ ID NO: 237, SEQ ID NO: 239, SEQ ID NO: 241, SEQ ID NO: 243, SEQ ID NO: 250, SEQ ID NO: 252, SEQ ID NO: 254, SEQ ID NO: 256, SEQ ID NO: 258, SEQ ID NO: 260, SEQ ID NO: 262, SEQ ID NO: 264, SEQ ID NO: 266, SEQ ID NO: 268, SEQ ID NO: 270, SEQ ID NO: 272, SEQ ID NO: 283, SEQ ID NO: 285, SEQ ID NO: 287, SEQ ID NO: 289, SEQ ID NO: 291, SEQ ID NO: 293, SEQ ID NO: 295, SEQ ID NO: 297, SEQ ID NO: 299, SEQ ID NO: 301, SEQ ID NO: 303, SEQ ID NO: 305, SEQ ID NO: 307, SEQ ID NO: 309, SEQ ID NO: 311, SEQ ID NO: 313, SEQ ID NO: 315, SEQ ID NO: 317, SEQ ID NO: 319, SEQ ID NO: 321, SEQ ID NO: 323, SEQ ID NO: 325, SEQ ID NO: 327, SEQ ID NO: 329, SEQ ID NO: 331, SEQ ID NO: 333, SEQ ID NO: 335, SEQ ID NO: 337, SEQ ID NO: 339, SEQ ID NO: 341, SEQ ID NO: 343, SEQ ID NO: 345, SEQ ID NO: 347, SEQ ID NO: 349, SEQ ID NO: 351, SEQ ID NO: 353, SEQ ID NO: 355, SEQ ID NO: 357, SEQ ID NO: 359, SEQ ID NO: 361, SEQ ID NO: 363, SEQ ID NO: 365, SEQ ID NO: 367, SEQ ID NO: 369, SEQ ID NO: 371, SEQ ID NO: 373, SEQ ID NO: 375, SEQ ID NO: 377, SEQ ID NO: 379, SEQ ID NO: 381, SEQ ID NO: 383, SEQ ID NO: 385, SEQ ID NO: 387, SEQ ID NO: 389, SEQ ID NO: 391, SEQ ID NO: 393, SEQ ID NO: 395, SEQ ID NO: 397, SEQ ID NO: 399, SEQ ID NO: 401, SEQ ID NO: 403, SEQ ID NO: 405, SEQ ID NO: 407, SEQ ID NO: 409, SEQ ID NO: 411, SEQ ID NO: 413, SEQ ID NO: 415, SEQ ID NO: 417, SEQ ID NO: 419, SEQ ID NO: 421, SEQ ID NO: 423, SEQ ID NO: 425, SEQ ID NO: 427, SEQ ID NO: 429, SEQ ID NO: 431, SEQ ID NO: 433, SEQ ID NO: 435 or SEQ ID NO: 441 or introducing an antisense nucleic acid molecule comprising a fragment of at least 15, 16, 17, 18, 19, 20, 21, 22, 23, 24 or 25 base pairs of a nucleic acid molecule with a homology of at least 50% to an antisense nucleic acid molecule to a nucleic acid molecule conferring the expression of a protein having the biological activity of protein as depicted in SEQ ID NO: 2, SEQ ID NO: 4, SEQ ID NO: 6, SEQ ID NO: 8, SEQ ID NO: 10, SEQ ID NO: 12, SEQ ID NO: 14, SEQ ID NO: 16, SEQ ID NO: 20, SEQ ID NO: 22, SEQ ID NO: 24, SEQ ID NO: 26, SEQ ID NO: 28, SEQ ID NO. 30, SEQ ID NO: 32; SEQ ID NO: 65, SEQ ID NO: 67, SEQ ID NO: 69, SEQ ID NO: 71, SEQ ID NO: 73, SEQ ID NO: 75, SEQ ID NO: 77, SEQ ID NO: 79, SEQ ID NO: 81, SEQ ID NO: 83, SEQ ID NO: 85, SEQ ID NO: 87, SEQ ID NO: 89, SEQ ID NO: 91, SEQ ID NO: 93, SEQ ID NO: 95, SEQ ID NO: 97, SEQ ID NO: 99, SEQ ID NO: 101, SEQ ID NO: 103, SEQ ID NO: 105, SEQ ID NO: 107, SEQ ID NO: 109, SEQ ID NO: 111, SEQ ID NO: 113, SEQ ID NO: 115, SEQ ID NO: 117, SEQ ID NO: 119, SEQ ID NO: 121, SEQ ID NO: 123, SEQ ID NO: 125, SEQ ID NO: 127, SEQ ID NO: 129, SEQ ID NO: 131, SEQ ID NO: 133, SEQ ID NO: 135, SEQ ID NO: 137, SEQ ID NO: 139, SEQ ID NO: 141, SEQ ID NO: 143, SEQ ID NO: 152, SEQ ID NO: 154, SEQ ID NO: 156, SEQ ID NO: 158, SEQ ID NO: 160, SEQ ID NO: 162, SEQ ID NO: 164, SEQ ID NO: 166, SEQ ID NO: 168, SEQ ID NO: 170, SEQ ID NO: 172, SEQ ID NO: 174, SEQ ID NO: 176, SEQ ID NO: 178, SEQ ID NO: 180, SEQ ID NO: 182, SEQ ID NO: 184, SEQ ID NO: 186, SEQ ID NO: 188, SEQ ID NO: 190, SEQ ID NO: 192, SEQ ID NO: 194, SEQ ID NO: 196, SEQ ID NO: 198, SEQ ID NO: 200, SEQ ID NO: 202, SEQ ID NO: 204, SEQ ID NO: 206, SEQ ID NO: 208, SEQ ID NO: 210, SEQ ID NO: 212, SEQ ID NO: 214, SEQ ID NO: 216, SEQ ID NO: 218, SEQ ID NO: 220, SEQ ID NO: 229, SEQ ID NO:231, SEQ ID NO:233, SEQ ID NO: 235, SEQ ID NO: 237, SEQ ID NO: 239, SEQ ID NO: 241, SEQ ID NO: 243, SEQ ID NO: 250, SEQ ID NO: 252, SEQ ID NO: 254, SEQ ID NO: 256, SEQ ID NO: 258, SEQ ID NO: 260, SEQ ID NO: 262, SEQ ID NO: 264, SEQ ID NO: 266, SEQ ID NO: 268, SEQ ID NO: 270, SEQ ID NO: 272, SEQ ID NO: 283, SEQ ID NO: 285, SEQ ID NO: 287, SEQ ID NO: 289, SEQ ID NO: 291, SEQ ID NO: 293, SEQ ID NO: 295, SEQ ID NO: 297, SEQ ID NO: 299, SEQ ID NO: 301, SEQ ID NO: 303, SEQ ID NO: 305, SEQ ID NO: 307, SEQ ID NO: 309, SEQ ID NO: 311, SEQ ID NO: 313, SEQ ID NO: 315, SEQ ID NO: 317, SEQ ID NO: 319, SEQ ID NO: 321, SEQ ID NO: 323, SEQ ID NO: 325, SEQ ID NO: 327, SEQ ID NO: 329, SEQ ID NO: 331, SEQ ID NO: 333, SEQ ID NO: 335, SEQ ID NO: 337, SEQ ID NO: 339, SEQ ID NO: 341, SEQ ID NO: 343, SEQ ID NO: 345, SEQ ID NO: 347, SEQ ID NO: 349, SEQ ID NO: 351, SEQ ID NO: 353, SEQ ID NO: 355, SEQ ID NO: 357, SEQ ID NO: 359, SEQ ID NO: 361, SEQ ID NO: 363, SEQ ID NO: 365, SEQ ID NO: 367, SEQ ID NO: 369, SEQ ID NO: 371, SEQ ID NO: 373, SEQ ID NO: 375, SEQ ID NO: 377, SEQ ID NO: 379, SEQ ID NO: 381, SEQ ID NO: 383, SEQ ID NO: 385, SEQ ID NO: 387, SEQ ID NO: 389, SEQ ID NO: 391, SEQ ID NO: 393, SEQ ID NO: 395, SEQ ID NO: 397, SEQ ID NO: 399, SEQ ID NO: 401, SEQ ID NO: 403, SEQ ID NO: 405, SEQ ID NO: 407, SEQ ID NO: 409, SEQ ID NO: 411, SEQ ID NO: 413, SEQ ID NO: 415, SEQ ID NO: 417, SEQ ID NO: 419, SEQ ID NO: 421, SEQ ID NO: 423, SEQ ID NO: 425, SEQ ID NO: 427, SEQ ID NO: 429, SEQ ID NO: 431, SEQ ID NO: 433, SEQ ID NO: 435 or SEQ ID NO: 441;
[0078] (c) introducing of a ribozyme which specifically cleaves a nucleic acid molecule conferring expression of a protein having the biological activity of protein as depicted in SEQ ID NO: 2, SEQ ID NO: 4, SEQ ID NO: 6, SEQ ID NO: 8, SEQ ID NO: 10, SEQ ID NO: 12, SEQ ID NO: 14, SEQ ID NO: 16, SEQ ID NO: 20, SEQ ID NO: 22, SEQ ID NO: 24, SEQ ID NO: 26, SEQ ID NO: 28, SEQ ID NO. 30, SEQ ID NO: 32; SEQ ID NO: 65, SEQ ID NO: 67, SEQ ID NO: 69, SEQ ID NO: 71, SEQ ID NO: 73, SEQ ID NO: 75, SEQ ID NO: 77, SEQ ID NO: 79, SEQ ID NO: 81, SEQ ID NO: 83, SEQ ID NO: 85, SEQ ID NO: 87, SEQ ID NO: 89, SEQ ID NO: 91, SEQ ID NO: 93, SEQ ID NO: 95, SEQ ID NO: 97, SEQ ID NO: 99, SEQ ID NO: 101, SEQ ID NO: 103, SEQ ID NO: 105, SEQ ID NO: 107, SEQ ID NO: 109, SEQ ID NO: 111, SEQ ID NO: 113, SEQ ID NO: 115, SEQ ID NO: 117, SEQ ID NO: 119, SEQ ID NO: 121, SEQ ID NO: 123, SEQ ID NO: 125, SEQ ID NO: 127, SEQ ID NO: 129, SEQ ID NO: 131, SEQ ID NO: 133, SEQ ID NO: 135, SEQ ID NO: 137, SEQ ID NO: 139, SEQ ID NO: 141, SEQ ID NO: 143, SEQ ID NO: 152, SEQ ID NO: 154, SEQ ID NO: 156, SEQ ID NO: 158, SEQ ID NO: 160, SEQ ID NO: 162, SEQ ID NO: 164, SEQ ID NO: 166, SEQ ID NO: 168, SEQ ID NO: 170, SEQ ID NO: 172, SEQ ID NO: 174, SEQ ID NO: 176, SEQ ID NO: 178, SEQ ID NO: 180, SEQ ID NO: 182, SEQ ID NO: 184, SEQ ID NO: 186, SEQ ID NO: 188, SEQ ID NO: 190, SEQ ID NO: 192, SEQ ID NO: 194, SEQ ID NO: 196, SEQ ID NO: 198, SEQ ID NO: 200, SEQ ID NO: 202, SEQ ID NO: 204, SEQ ID NO: 206, SEQ ID NO: 208, SEQ ID NO: 210, SEQ ID NO: 212, SEQ ID NO: 214, SEQ ID NO: 216, SEQ ID NO: 218, SEQ ID NO: 220, SEQ ID NO: 229, SEQ ID NO:231, SEQ ID NO:233, SEQ ID NO: 235, SEQ ID NO: 237, SEQ ID NO: 239, SEQ ID NO: 241, SEQ ID NO: 243, SEQ ID NO: 250, SEQ ID NO: 252, SEQ ID NO: 254, SEQ ID NO: 256, SEQ ID NO: 258, SEQ ID NO: 260, SEQ ID NO: 262, SEQ ID NO: 264, SEQ ID NO: 266, SEQ ID NO: 268, SEQ ID NO: 270, SEQ ID NO: 272, SEQ ID NO: 283, SEQ ID NO: 285, SEQ ID NO: 287, SEQ ID NO: 289, SEQ ID NO: 291, SEQ ID NO: 293, SEQ ID NO: 295, SEQ ID NO: 297, SEQ ID NO: 299, SEQ ID NO: 301, SEQ ID NO: 303, SEQ ID NO: 305, SEQ ID NO: 307, SEQ ID NO: 309, SEQ ID NO: 311, SEQ ID NO: 313, SEQ ID NO: 315, SEQ ID NO: 317, SEQ ID NO: 319, SEQ ID NO: 321, SEQ ID NO: 323, SEQ ID NO: 325, SEQ ID NO: 327, SEQ ID NO: 329, SEQ ID NO: 331, SEQ ID NO: 333, SEQ ID NO: 335, SEQ ID NO: 337, SEQ ID NO: 339, SEQ ID NO: 341, SEQ ID NO: 343, SEQ ID NO: 345, SEQ ID NO: 347, SEQ ID NO: 349, SEQ ID NO: 351, SEQ ID NO: 353, SEQ ID NO: 355, SEQ ID NO: 357, SEQ ID NO: 359, SEQ ID NO: 361, SEQ ID NO: 363, SEQ ID NO: 365, SEQ ID NO: 367, SEQ ID NO: 369, SEQ ID NO: 371, SEQ ID NO: 373, SEQ ID NO: 375, SEQ ID NO: 377, SEQ ID NO: 379, SEQ ID NO: 381, SEQ ID NO: 383, SEQ ID NO: 385, SEQ ID NO: 387, SEQ ID NO: 389, SEQ ID NO: 391, SEQ ID NO: 393, SEQ ID NO: 395, SEQ ID NO: 397, SEQ ID NO: 399, SEQ ID NO: 401, SEQ ID NO: 403, SEQ ID NO: 405, SEQ ID NO: 407, SEQ ID NO: 409, SEQ ID NO: 411, SEQ ID NO: 413, SEQ ID NO: 415, SEQ ID NO: 417, SEQ ID NO: 419, SEQ ID NO: 421, SEQ ID NO: 423, SEQ ID NO: 425, SEQ ID NO: 427, SEQ ID NO: 429, SEQ ID NO: 431, SEQ ID NO: 433, SEQ ID NO: 435 or SEQ ID NO: 441;
[0079] (d) introducing of the antisense nucleic acid molecule characterized in (b) and the ribozyme characterized in (c);
[0080] (e) introducing of a sense nucleic acid molecule conferring the expression of a nucleic acid molecule as depicted in SEQ ID NO: 1, SEQ ID NO: 3, SEQ ID NO: 5, SEQ ID NO: 7, SEQ ID NO: 9, SEQ ID NO: 11, SEQ ID NO: 13, SEQ ID NO: 15, SEQ ID NO: 19, SEQ ID NO: 21, SEQ ID NO: 23, SEQ ID NO: 25, SEQ ID NO: 27, SEQ ID NO: 29, SEQ ID NO: 31; SEQ ID NO: 64, SEQ ID NO: 66, SEQ ID NO: 68, SEQ ID NO: 70, SEQ ID NO: 72, SEQ ID NO: 74, SEQ ID NO: 76, SEQ ID NO: 78, SEQ ID NO: 80, SEQ ID NO: 82, SEQ ID NO: 84, SEQ ID NO: 86, SEQ ID NO: 88, SEQ ID NO: 90, SEQ ID NO: 92, SEQ ID NO: 94, SEQ ID NO: 96, SEQ ID NO: 98, SEQ ID NO: 100, SEQ ID NO: 102, SEQ ID NO: 104, SEQ ID NO: 106, SEQ ID NO: 108, SEQ ID NO: 110, SEQ ID NO: 112, SEQ ID NO: 114, SEQ ID NO: 116, SEQ ID NO: 118, SEQ ID NO: 120, SEQ ID NO: 122, SEQ ID NO: 124, SEQ ID NO: 126, SEQ ID NO: 128, SEQ ID NO: 130, SEQ ID NO: 132, SEQ ID NO: 134, SEQ ID NO: 136, SEQ ID NO: 138, SEQ ID NO: 140, SEQ ID NO: , SEQ ID NO: 142, SEQ ID NO: 151, SEQ ID NO: 153, SEQ ID NO: 155, SEQ ID NO: 157, SEQ ID NO: 159, SEQ ID NO: 161, SEQ ID NO: 163, SEQ ID NO: 165, SEQ ID NO: 167, SEQ ID NO: 169, SEQ ID NO: 171, SEQ ID NO: 173, SEQ ID NO: 175, SEQ ID NO: 177, SEQ ID NO: 179, SEQ ID NO: 181, SEQ ID NO: 183, SEQ ID NO: 185, SEQ ID NO: 187, SEQ ID NO: 189, SEQ ID NO: 191, SEQ ID NO: 193, SEQ ID NO: 195, SEQ ID NO: 197, SEQ ID NO: 199, SEQ ID NO: 201, SEQ ID NO: 203, SEQ ID NO: 205, SEQ ID NO: 207, SEQ ID NO: 209, SEQ ID NO: 211, SEQ ID NO: 213, SEQ ID NO: 215, SEQ ID NO: 217, SEQ ID NO: 219, SEQ ID NO: 228, SEQ ID NO: 230, SEQ ID NO: 232, SEQ ID NO: 234, SEQ ID NO: 236, SEQ ID NO: 238, SEQ ID NO: 240, SEQ ID NO: 242, SEQ ID NO: 249, SEQ ID NO: 251, SEQ ID NO: 253, SEQ ID NO: 255, SEQ ID NO: 257, SEQ ID NO: 259, SEQ ID NO: 261, SEQ ID NO: 263, SEQ ID NO: 265, SEQ ID NO: 267, SEQ ID NO: 269, SEQ ID NO: 271, SEQ ID NO: 282, SEQ ID NO: 284, SEQ ID NO: 286, SEQ ID NO: 288, SEQ ID NO: 290, SEQ ID NO: 292, SEQ ID NO: 294, SEQ ID NO: 296, SEQ ID NO: 298, SEQ ID NO: 300, SEQ ID NO: 302, SEQ ID NO: 304, SEQ ID NO: 306, SEQ ID NO: 308, SEQ ID NO: 310, SEQ ID NO: 312, SEQ ID NO: 314, SEQ ID NO: 316, SEQ ID NO: 318, SEQ ID NO: 320, SEQ ID NO: 322, SEQ ID NO: 324, SEQ ID NO: 326, SEQ ID NO: 328, SEQ ID NO: 330, SEQ ID NO: 332, SEQ ID NO: 334, SEQ ID NO: 336, SEQ ID NO: 338, SEQ ID NO: 340, SEQ ID NO: 342, SEQ ID NO: 344, SEQ ID NO: 346, SEQ ID NO: 348, SEQ ID NO: 350, SEQ ID NO: 352, SEQ ID NO: 354, SEQ ID NO: 356, SEQ ID NO: 358, SEQ ID NO: 360, SEQ ID NO: 362, SEQ ID NO: 364, SEQ ID NO: 366, SEQ ID NO: 368, SEQ ID NO: 370, SEQ ID NO: 372, SEQ ID NO: 374, SEQ ID NO: 376, SEQ ID NO: 378, SEQ ID NO: 380, SEQ ID NO: 382, SEQ ID NO: 384, SEQ ID NO: 386, SEQ ID NO: 388, SEQ ID NO: 390, SEQ ID NO: 392, SEQ ID NO: 394, SEQ ID NO: 396, SEQ ID NO: 398, SEQ ID NO: 400, SEQ ID NO: 402, SEQ ID NO: 404, SEQ ID NO: 406, SEQ ID NO: 408, SEQ ID NO: 410, SEQ ID NO: 412, SEQ ID NO: 414, SEQ ID NO: 416, SEQ ID NO: 418, SEQ ID NO: 420, SEQ ID NO: 422, SEQ ID NO: 424, SEQ ID NO: 426, SEQ ID NO: 428, SEQ ID NO: 430, SEQ ID NO: 432, SEQ ID NO: 434 or SEQ ID NO: 440 or a nucleic acid molecule encoding a polypeptide or part of it (need not to encode a functional protein) having at least 50% identity with the amino acid sequence of the polypeptide encoded by the nucleic acid molecule used in the inventive process and having the biological activity represented by the protein as depicted in SEQ ID NO: 2, SEQ ID NO: 4, SEQ ID NO: 6, SEQ ID NO: 8, SEQ ID NO: 10, SEQ ID NO: 12, SEQ ID NO: 14, SEQ ID NO: 16, SEQ ID NO: 20, SEQ ID NO: 22, SEQ ID NO: 24, SEQ ID NO: 26, SEQ ID NO: 28, SEQ ID NO. 30, SEQ ID NO: 32; SEQ ID NO: 65, SEQ ID NO: 67, SEQ ID NO: 69, SEQ ID NO: 71, SEQ ID NO: 73, SEQ ID NO: 75, SEQ ID NO: 77, SEQ ID NO: 79, SEQ ID NO: 81, SEQ ID NO: 83, SEQ ID NO: 85, SEQ ID NO: 87, SEQ ID NO: 89, SEQ ID NO: 91, SEQ ID NO: 93, SEQ ID NO: 95, SEQ ID NO: 97, SEQ ID NO: 99, SEQ ID NO: 101, SEQ ID NO: 103, SEQ ID NO: 105, SEQ ID NO: 107, SEQ ID NO: 109, SEQ ID NO: 111, SEQ ID NO: 113, SEQ ID NO: 115, SEQ ID NO: 117, SEQ ID NO: 119, SEQ ID NO: 121, SEQ ID NO: 123, SEQ ID NO: 125, SEQ ID NO: 127, SEQ ID NO: 129, SEQ ID NO: 131, SEQ ID NO: 133, SEQ ID NO: 135, SEQ ID NO: 137, SEQ ID NO: 139, SEQ ID NO: 141, SEQ ID NO: 143, SEQ ID NO: 152, SEQ ID NO: 154, SEQ ID NO: 156, SEQ ID NO: 158, SEQ ID NO: 160, SEQ ID NO: 162, SEQ ID NO: 164, SEQ ID NO: 166, SEQ ID NO: 168, SEQ ID NO: 170, SEQ ID NO: 172, SEQ ID NO: 174, SEQ ID NO: 176, SEQ ID NO: 178, SEQ ID NO: 180, SEQ ID NO: 182, SEQ ID NO: 184, SEQ ID NO: 186, SEQ ID NO: 188, SEQ ID NO: 190, SEQ ID NO: 192, SEQ ID NO: 194, SEQ ID NO: 196, SEQ ID NO: 198, SEQ ID NO: 200, SEQ ID NO: 202, SEQ ID NO: 204, SEQ ID NO: 206, SEQ ID NO: 208, SEQ ID NO: 210, SEQ ID NO: 212, SEQ ID NO: 214, SEQ ID NO: 216, SEQ ID NO: 218, SEQ ID NO: 220, SEQ ID NO: 229, SEQ ID NO:231, SEQ ID NO:233, SEQ ID NO: 235, SEQ ID NO: 237, SEQ ID NO: 239, SEQ ID NO: 241, SEQ ID NO: 243, SEQ ID NO: 250, SEQ ID NO: 252, SEQ ID NO: 254, SEQ ID NO: 256, SEQ ID NO: 258, SEQ ID NO: 260, SEQ ID NO: 262, SEQ ID NO: 264, SEQ ID NO: 266, SEQ ID NO: 268, SEQ ID NO: 270, SEQ ID NO: 272, SEQ ID NO: 283, SEQ ID NO: 285, SEQ ID NO: 287, SEQ ID NO: 289, SEQ ID NO: 291, SEQ ID NO: 293, SEQ ID NO: 295, SEQ ID NO: 297, SEQ ID NO: 299, SEQ ID NO: 301, SEQ ID NO: 303, SEQ ID NO: 305, SEQ ID NO: 307, SEQ ID NO: 309, SEQ ID NO: 311, SEQ ID NO: 313, SEQ ID NO: 315, SEQ ID NO: 317, SEQ ID NO: 319, SEQ ID NO: 321, SEQ ID NO: 323, SEQ ID NO: 325, SEQ ID NO: 327, SEQ ID NO: 329, SEQ ID NO: 331, SEQ ID NO: 333, SEQ ID NO: 335, SEQ ID NO: 337, SEQ ID NO: 339, SEQ ID NO: 341, SEQ ID NO: 343, SEQ ID NO: 345, SEQ ID NO: 347, SEQ ID NO: 349, SEQ ID NO: 351, SEQ ID NO: 353, SEQ ID NO: 355, SEQ ID NO: 357, SEQ ID NO: 359, SEQ ID NO: 361, SEQ ID NO: 363, SEQ ID NO: 365, SEQ ID NO: 367, SEQ ID NO: 369, SEQ ID NO: 371, SEQ ID NO: 373, SEQ ID NO: 375, SEQ ID NO: 377, SEQ ID NO: 379, SEQ ID NO: 381, SEQ ID NO: 383, SEQ ID NO: 385, SEQ ID NO: 387, SEQ ID NO: 389, SEQ ID NO: 391, SEQ ID NO: 393, SEQ ID NO: 395, SEQ ID NO: 397, SEQ ID NO: 399, SEQ ID NO: 401, SEQ ID NO: 403, SEQ ID NO: 405, SEQ ID NO: 407, SEQ ID NO: 409, SEQ ID NO: 411, SEQ ID NO: 413, SEQ ID NO: 415, SEQ ID NO: 417, SEQ ID NO: 419, SEQ ID NO: 421, SEQ ID NO: 423, SEQ ID NO: 425, SEQ ID NO: 427, SEQ ID NO: 429, SEQ ID NO: 431, SEQ ID NO: 433, SEQ ID NO: 435 or SEQ ID NO: 441 for inducing a co-suppression of the endogenous protein having a biological activity of the protein as depicted in SEQ ID NO: 2, SEQ ID NO: 4, SEQ ID NO: 6, SEQ ID NO: 8, SEQ ID NO: 10, SEQ ID NO: 12, SEQ ID NO: 14, SEQ ID NO: 16, SEQ ID NO: 20, SEQ ID NO: 22, SEQ ID NO: 24, SEQ ID NO: 26, SEQ ID NO: 28, SEQ ID NO. 30, SEQ ID NO: 32; SEQ ID NO: 65, SEQ ID NO: 67, SEQ ID NO: 69, SEQ ID NO: 71, SEQ ID NO: 73, SEQ ID NO: 75, SEQ ID NO: 77, SEQ ID NO: 79, SEQ ID NO: 81, SEQ ID NO: 83, SEQ ID NO: 85, SEQ ID NO: 87, SEQ ID NO: 89, SEQ ID NO: 91, SEQ ID NO: 93, SEQ ID NO: 95, SEQ ID NO: 97, SEQ ID NO: 99, SEQ ID NO: 101, SEQ ID NO: 103, SEQ ID NO: 105, SEQ ID NO: 107, SEQ ID NO: 109, SEQ ID NO: 111, SEQ ID NO: 113, SEQ ID NO: 115, SEQ ID NO: 117, SEQ ID NO: 119, SEQ ID NO: 121, SEQ ID NO: 123, SEQ ID NO: 125, SEQ ID NO: 127, SEQ ID NO: 129, SEQ ID NO: 131, SEQ ID NO: 133, SEQ ID NO: 135, SEQ ID NO: 137, SEQ ID NO: 139, SEQ ID NO: 141, SEQ ID NO: 143, SEQ ID NO: 152, SEQ ID NO: 154, SEQ ID NO: 156, SEQ ID NO: 158, SEQ ID NO: 160, SEQ ID NO: 162, SEQ ID NO: 164, SEQ ID NO: 166, SEQ ID NO: 168, SEQ ID NO: 170, SEQ ID NO: 172, SEQ ID NO: 174, SEQ ID NO: 176, SEQ ID NO: 178, SEQ ID NO: 180, SEQ ID NO: 182, SEQ ID NO: 184, SEQ ID NO: 186, SEQ ID NO: 188, SEQ ID NO: 190, SEQ ID NO: 192, SEQ ID NO: 194, SEQ ID NO: 196, SEQ ID NO: 198, SEQ ID NO: 200, SEQ ID NO: 202, SEQ ID NO: 204, SEQ ID NO: 206, SEQ ID NO: 208, SEQ ID NO: 210, SEQ ID NO: 212, SEQ ID NO: 214, SEQ ID NO: 216, SEQ ID NO: 218, SEQ ID NO: 220, SEQ ID NO: 229, SEQ ID NO:231, SEQ ID NO:233, SEQ ID NO: 235, SEQ ID NO: 237, SEQ ID NO: 239, SEQ ID NO: 241, SEQ ID NO: 243, SEQ ID NO: 250, SEQ ID NO: 252, SEQ ID NO: 254, SEQ ID NO: 256, SEQ ID NO: 258, SEQ ID NO: 260, SEQ ID NO: 262, SEQ ID NO: 264, SEQ ID NO: 266, SEQ ID NO: 268, SEQ ID NO: 270, SEQ ID NO: 272, SEQ ID NO: 283, SEQ ID NO: 285, SEQ ID NO: 287, SEQ ID NO: 289, SEQ ID NO: 291, SEQ ID NO: 293, SEQ ID NO: 295, SEQ ID NO: 297, SEQ ID NO: 299, SEQ ID NO: 301, SEQ ID NO: 303, SEQ ID NO: 305, SEQ ID NO: 307, SEQ ID NO: 309, SEQ ID NO: 311, SEQ ID NO: 313, SEQ ID NO: 315, SEQ ID NO: 317, SEQ ID NO: 319, SEQ ID NO: 321, SEQ ID NO: 323, SEQ ID NO: 325, SEQ ID NO: 327, SEQ ID NO: 329, SEQ ID NO: 331, SEQ ID NO: 333, SEQ ID NO: 335, SEQ ID NO: 337, SEQ ID NO: 339, SEQ ID NO: 341, SEQ ID NO: 343, SEQ ID NO: 345, SEQ ID NO: 347, SEQ ID NO: 349, SEQ ID NO: 351, SEQ ID NO: 353, SEQ ID NO: 355, SEQ ID NO: 357, SEQ ID NO: 359, SEQ ID NO: 361, SEQ ID NO: 363, SEQ ID NO: 365, SEQ ID NO: 367, SEQ ID NO: 369, SEQ ID NO: 371, SEQ ID NO: 373, SEQ ID NO: 375, SEQ ID NO: 377, SEQ ID NO: 379, SEQ ID NO: 381, SEQ ID NO: 383, SEQ ID NO: 385, SEQ ID NO: 387, SEQ ID NO: 389, SEQ ID NO: 391, SEQ ID NO: 393, SEQ ID NO: 395, SEQ ID NO: 397, SEQ ID NO: 399, SEQ ID NO: 401, SEQ ID NO: 403, SEQ ID NO: 405, SEQ ID NO: 407, SEQ ID NO: 409, SEQ ID NO: 411, SEQ ID NO: 413, SEQ ID NO: 415, SEQ ID NO: 417, SEQ ID NO: 419, SEQ ID NO: 421, SEQ ID NO: 423, SEQ ID NO: 425, SEQ ID NO: 427, SEQ ID NO: 429, SEQ ID NO: 431, SEQ ID NO: 433, SEQ ID NO: 435 or SEQ ID NO: 441;
[0081] (f) introducing a nucleic acid molecule conferring the expression of a dominant-negative mutant of a protein having the biological activity of a protein as depicted in SEQ ID NO: 2, SEQ ID NO: 4, SEQ ID NO: 6, SEQ ID NO: 8, SEQ ID NO: 10, SEQ ID NO: 12, SEQ ID NO: 14, SEQ ID NO: 16, SEQ ID NO: 20, SEQ ID NO: 22, SEQ ID NO: 24, SEQ ID NO: 26, SEQ ID NO: 28, SEQ ID NO. 30, SEQ ID NO: 32; SEQ ID NO: 65, SEQ ID NO: 67, SEQ ID NO: 69, SEQ ID NO: 71, SEQ ID NO: 73, SEQ ID NO: 75, SEQ ID NO: 77, SEQ ID NO: 79, SEQ ID NO: 81, SEQ ID NO: 83, SEQ ID NO: 85, SEQ ID NO: 87, SEQ ID NO: 89, SEQ ID NO: 91, SEQ ID NO: 93, SEQ ID NO: 95, SEQ ID NO: 97, SEQ ID NO: 99, SEQ ID NO: 101, SEQ ID NO: 103, SEQ ID NO: 105, SEQ ID NO: 107, SEQ ID NO: 109, SEQ ID NO: 111, SEQ ID NO: 113, SEQ ID NO: 115, SEQ ID NO: 117, SEQ ID NO: 119, SEQ ID NO: 121, SEQ ID NO: 123, SEQ ID NO: 125, SEQ ID NO: 127, SEQ ID NO: 129, SEQ ID NO: 131, SEQ ID NO: 133, SEQ ID NO: 135, SEQ ID NO: 137, SEQ ID NO: 139, SEQ ID NO: 141, SEQ ID NO: 143, SEQ ID NO: 152, SEQ ID NO: 154, SEQ ID NO: 156, SEQ ID NO: 158, SEQ ID NO: 160, SEQ ID NO: 162, SEQ ID NO: 164, SEQ ID NO: 166, SEQ ID NO: 168, SEQ ID NO: 170, SEQ ID NO: 172, SEQ ID NO: 174, SEQ ID NO: 176, SEQ ID NO: 178, SEQ ID NO: 180, SEQ ID NO: 182, SEQ ID NO: 184, SEQ ID NO: 186, SEQ ID NO: 188, SEQ ID NO: 190, SEQ ID NO: 192, SEQ ID NO: 194, SEQ ID NO: 196, SEQ ID NO: 198, SEQ ID NO: 200, SEQ ID NO: 202, SEQ ID NO: 204, SEQ ID NO: 206, SEQ ID NO: 208, SEQ ID NO: 210, SEQ ID NO: 212, SEQ ID NO: 214, SEQ ID NO: 216, SEQ ID NO: 218, SEQ ID NO: 220, SEQ ID NO: 229, SEQ ID NO:231, SEQ ID NO:233, SEQ ID NO: 235, SEQ ID NO: 237, SEQ ID NO: 239, SEQ ID NO: 241, SEQ ID NO: 243, SEQ ID NO: 250, SEQ ID NO: 252, SEQ ID NO: 254, SEQ ID NO: 256, SEQ ID NO: 258, SEQ ID NO: 260, SEQ ID NO: 262, SEQ ID NO: 264, SEQ ID NO: 266, SEQ ID NO: 268, SEQ ID NO: 270, SEQ ID NO: 272, SEQ ID NO: 283, SEQ ID NO: 285, SEQ ID NO: 287, SEQ ID NO: 289, SEQ ID NO: 291, SEQ ID NO: 293, SEQ ID NO: 295, SEQ ID NO: 297, SEQ ID NO: 299, SEQ ID NO: 301, SEQ ID NO: 303, SEQ ID NO: 305, SEQ ID NO: 307, SEQ ID NO: 309, SEQ ID NO: 311, SEQ ID NO: 313, SEQ ID NO: 315, SEQ ID NO: 317, SEQ ID NO: 319, SEQ ID NO: 321, SEQ ID NO: 323, SEQ ID NO: 325, SEQ ID NO: 327, SEQ ID NO: 329, SEQ ID NO: 331, SEQ ID NO: 333, SEQ ID NO: 335, SEQ ID NO: 337, SEQ ID NO: 339, SEQ ID NO: 341, SEQ ID NO: 343, SEQ ID NO: 345, SEQ ID NO: 347, SEQ ID NO: 349, SEQ ID NO: 351, SEQ ID NO: 353, SEQ ID NO: 355, SEQ ID NO: 357, SEQ ID NO: 359, SEQ ID NO: 361, SEQ ID NO: 363, SEQ ID NO: 365, SEQ ID NO: 367, SEQ ID NO: 369, SEQ ID NO: 371, SEQ ID NO: 373, SEQ ID NO: 375, SEQ ID NO: 377, SEQ ID NO: 379, SEQ ID NO: 381, SEQ ID NO: 383, SEQ ID NO: 385, SEQ ID NO: 387, SEQ ID NO: 389, SEQ ID NO: 391, SEQ ID NO: 393, SEQ ID NO: 395, SEQ ID NO: 397, SEQ ID NO: 399, SEQ ID NO: 401, SEQ ID NO: 403, SEQ ID NO: 405, SEQ ID NO: 407, SEQ ID NO: 409, SEQ ID NO: 411, SEQ ID NO: 413, SEQ ID NO: 415, SEQ ID NO: 417, SEQ ID NO: 419, SEQ ID NO: 421, SEQ ID NO: 423, SEQ ID NO: 425, SEQ ID NO: 427, SEQ ID NO: 429, SEQ ID NO: 431, SEQ ID NO: 433, SEQ ID NO: 435 or SEQ ID NO: 441, that means by expressing said sequence leading to the dominant-negative mutant protein thereby the biological activity of the protein used in the inventive process is reduced, decreased or deleted and therefore the production of the fine chemical is increased;
[0082] (g) introducing a nucleic acid molecule encoding a factor, which binds to a nucleic acid molecule conferring the expression of a protein having the biological activity of a protein as depicted in SEQ ID NO: 2, SEQ ID NO: 4, SEQ ID NO: 6, SEQ ID NO: 8, SEQ ID NO: 10, SEQ ID NO: 12, SEQ ID NO: 14, SEQ ID NO: 16, SEQ ID NO: 20, SEQ ID NO: 22, SEQ ID NO: 24, SEQ ID NO: 26, SEQ ID NO: 28, SEQ ID NO. 30, SEQ ID NO: 32; SEQ ID NO: 65, SEQ ID NO: 67, SEQ ID NO: 69, SEQ ID NO: 71, SEQ ID NO: 73, SEQ ID NO: 75, SEQ ID NO: 77, SEQ ID NO: 79, SEQ ID NO: 81, SEQ ID NO: 83, SEQ ID NO: 85, SEQ ID NO: 87, SEQ ID NO: 89, SEQ ID NO: 91, SEQ ID NO: 93, SEQ ID NO: 95, SEQ ID NO: 97, SEQ ID NO: 99, SEQ ID NO: 101, SEQ ID NO: 103, SEQ ID NO: 105, SEQ ID NO: 107, SEQ ID NO: 109, SEQ ID NO: 111, SEQ ID NO: 113, SEQ ID NO: 115, SEQ ID NO: 117, SEQ ID NO: 119, SEQ ID NO: 121, SEQ ID NO: 123, SEQ ID NO: 125, SEQ ID NO: 127, SEQ ID NO: 129, SEQ ID NO: 131, SEQ ID NO: 133, SEQ ID NO: 135, SEQ ID NO: 137, SEQ ID NO: 139, SEQ ID NO: 141, SEQ ID NO: 143, SEQ ID NO: 152, SEQ ID NO: 154, SEQ ID NO: 156, SEQ ID NO: 158, SEQ ID NO: 160, SEQ ID NO: 162, SEQ ID NO: 164, SEQ ID NO: 166, SEQ ID NO: 168, SEQ ID NO: 170, SEQ ID NO: 172, SEQ ID NO: 174, SEQ ID NO: 176, SEQ ID NO: 178, SEQ ID NO: 180, SEQ ID NO: 182, SEQ ID NO: 184, SEQ ID NO: 186, SEQ ID NO: 188, SEQ ID NO: 190, SEQ ID NO: 192, SEQ ID NO: 194, SEQ ID NO: 196, SEQ ID NO: 198, SEQ ID NO: 200, SEQ ID NO: 202, SEQ ID NO: 204, SEQ ID NO: 206, SEQ ID NO: 208, SEQ ID NO: 210, SEQ ID NO: 212, SEQ ID NO: 214, SEQ ID NO: 216, SEQ ID NO: 218, SEQ ID NO: 220, SEQ ID NO: 229, SEQ ID NO:231, SEQ ID NO:233, SEQ ID NO: 235, SEQ ID NO: 237, SEQ ID NO: 239, SEQ ID NO: 241, SEQ ID NO: 243, SEQ ID NO: 250, SEQ ID NO: 252, SEQ ID NO: 254, SEQ ID NO: 256, SEQ ID NO: 258, SEQ ID NO: 260, SEQ ID NO: 262, SEQ ID NO: 264, SEQ ID NO: 266, SEQ ID NO: 268, SEQ ID NO: 270, SEQ ID NO: 272, SEQ ID NO: 283, SEQ ID NO: 285, SEQ ID NO: 287, SEQ ID NO: 289, SEQ ID NO: 291, SEQ ID NO: 293, SEQ ID NO: 295, SEQ ID NO: 297, SEQ ID NO: 299, SEQ ID NO: 301, SEQ ID NO: 303, SEQ ID NO: 305, SEQ ID NO: 307, SEQ ID NO: 309, SEQ ID NO: 311, SEQ ID NO: 313, SEQ ID NO: 315, SEQ ID NO: 317, SEQ ID NO: 319, SEQ ID NO: 321, SEQ ID NO: 323, SEQ ID NO: 325, SEQ ID NO: 327, SEQ ID NO: 329, SEQ ID NO: 331, SEQ ID NO: 333, SEQ ID NO: 335, SEQ ID NO: 337, SEQ ID NO: 339, SEQ ID NO: 341, SEQ ID NO: 343, SEQ ID NO: 345, SEQ ID NO: 347, SEQ ID NO: 349, SEQ ID NO: 351, SEQ ID NO: 353, SEQ ID NO: 355, SEQ ID NO: 357, SEQ ID NO: 359, SEQ ID NO: 361, SEQ ID NO: 363, SEQ ID NO: 365, SEQ ID NO: 367, SEQ ID NO: 369, SEQ ID NO: 371, SEQ ID NO: 373, SEQ ID NO: 375, SEQ ID NO: 377, SEQ ID NO: 379, SEQ ID NO: 381, SEQ ID NO: 383, SEQ ID NO: 385, SEQ ID NO: 387, SEQ ID NO: 389, SEQ ID NO: 391, SEQ ID NO: 393, SEQ ID NO: 395, SEQ ID NO: 397, SEQ ID NO: 399, SEQ ID NO: 401, SEQ ID NO: 403, SEQ ID NO: 405, SEQ ID NO: 407, SEQ ID NO: 409, SEQ ID NO: 411, SEQ ID NO: 413, SEQ ID NO: 415, SEQ ID NO: 417, SEQ ID NO: 419, SEQ ID NO: 421, SEQ ID NO: 423, SEQ ID NO: 425, SEQ ID NO: 427, SEQ ID NO: 429, SEQ ID NO: 431, SEQ ID NO: 433, SEQ ID NO: 435 or SEQ ID NO: 441;
[0083] (h) introducing a viral nucleic acid molecule conferring the decline of a RNA molecule conferring the expression of a protein having the biological activity of a protein used in the inventive process especially a protein as depicted in SEQ ID NO: 2, SEQ ID NO: 4, SEQ ID NO: 6, SEQ ID NO: 8, SEQ ID NO: 10, SEQ ID NO: 12, SEQ ID NO: 14, SEQ ID NO: 16, SEQ ID NO: 20, SEQ ID NO: 22, SEQ ID NO: 24, SEQ ID NO: 26, SEQ ID NO: 28, SEQ ID NO. 30, SEQ ID NO: 32; SEQ ID NO: 65, SEQ ID NO: 67, SEQ ID NO: 69, SEQ ID NO: 71, SEQ ID NO: 73, SEQ ID NO: 75, SEQ ID NO: 77, SEQ ID NO: 79, SEQ ID NO: 81, SEQ ID NO: 83, SEQ ID NO: 85, SEQ ID NO: 87, SEQ ID NO: 89, SEQ ID NO: 91, SEQ ID NO: 93, SEQ ID NO: 95, SEQ ID NO: 97, SEQ ID NO: 99, SEQ ID NO: 101, SEQ ID NO: 103, SEQ ID NO: 105, SEQ ID NO: 107, SEQ ID NO: 109, SEQ ID NO: 111, SEQ ID NO: 113, SEQ ID NO: 115, SEQ ID NO: 117, SEQ ID NO: 119, SEQ ID NO: 121, SEQ ID NO: 123, SEQ ID NO: 125, SEQ ID NO: 127, SEQ ID NO: 129, SEQ ID NO: 131, SEQ ID NO: 133, SEQ ID NO: 135, SEQ ID NO: 137, SEQ ID NO: 139, SEQ ID NO: 141, SEQ ID NO: 143, SEQ ID NO: 152, SEQ ID NO: 154, SEQ ID NO: 156, SEQ ID NO: 158, SEQ ID NO: 160, SEQ ID NO: 162, SEQ ID NO: 164, SEQ ID NO: 166, SEQ ID NO: 168, SEQ ID NO: 170, SEQ ID NO: 172, SEQ ID NO: 174, SEQ ID NO: 176, SEQ ID NO: 178, SEQ ID NO: 180, SEQ ID NO: 182, SEQ ID NO: 184, SEQ ID NO: 186, SEQ ID NO: 188, SEQ ID NO: 190, SEQ ID NO: 192, SEQ ID NO: 194, SEQ ID NO: 196, SEQ ID NO: 198, SEQ ID NO: 200, SEQ ID NO: 202, SEQ ID NO: 204, SEQ ID NO: 206, SEQ ID NO: 208, SEQ ID NO: 210, SEQ ID NO: 212, SEQ ID NO: 214, SEQ ID NO: 216, SEQ ID NO: 218, SEQ ID NO: 220, SEQ ID NO: 229, SEQ ID NO:231, SEQ ID NO:233, SEQ ID NO: 235, SEQ ID NO: 237, SEQ ID NO: 239, SEQ ID NO: 241, SEQ ID NO: 243, SEQ ID NO: 250, SEQ ID NO: 252, SEQ ID NO: 254, SEQ ID NO: 256, SEQ ID NO: 258, SEQ ID NO: 260, SEQ ID NO: 262, SEQ ID NO: 264, SEQ ID NO: 266, SEQ ID NO: 268, SEQ ID NO: 270, SEQ ID NO: 272, SEQ ID NO: 283, SEQ ID NO: 285, SEQ ID NO: 287, SEQ ID NO: 289, SEQ ID NO: 291, SEQ ID NO: 293, SEQ ID NO: 295, SEQ ID NO: 297, SEQ ID NO: 299, SEQ ID NO: 301, SEQ ID NO: 303, SEQ ID NO: 305, SEQ ID NO: 307, SEQ ID NO: 309, SEQ ID NO: 311, SEQ ID NO: 313, SEQ ID NO: 315, SEQ ID NO: 317, SEQ ID NO: 319, SEQ ID NO: 321, SEQ ID NO: 323, SEQ ID NO: 325, SEQ ID NO: 327, SEQ ID NO: 329, SEQ ID NO: 331, SEQ ID NO: 333, SEQ ID NO: 335, SEQ ID NO: 337, SEQ ID NO: 339, SEQ ID NO: 341, SEQ ID NO: 343, SEQ ID NO: 345, SEQ ID NO: 347, SEQ ID NO: 349, SEQ ID NO: 351, SEQ ID NO: 353, SEQ ID NO: 355, SEQ ID NO: 357, SEQ ID NO: 359, SEQ ID NO: 361, SEQ ID NO: 363, SEQ ID NO: 365, SEQ ID NO: 367, SEQ ID NO: 369, SEQ ID NO: 371, SEQ ID NO: 373, SEQ ID NO: 375, SEQ ID NO: 377, SEQ ID NO: 379, SEQ ID NO: 381, SEQ ID NO: 383, SEQ ID NO: 385, SEQ ID NO: 387, SEQ ID NO: 389, SEQ ID NO: 391, SEQ ID NO: 393, SEQ ID NO: 395, SEQ ID NO: 397, SEQ ID NO: 399, SEQ ID NO: 401, SEQ ID NO: 403, SEQ ID NO: 405, SEQ ID NO: 407, SEQ ID NO: 409, SEQ ID NO: 411, SEQ ID NO: 413, SEQ ID NO: 415, SEQ ID NO: 417, SEQ ID NO: 419, SEQ ID NO: 421, SEQ ID NO: 423, SEQ ID NO: 425, SEQ ID NO: 427, SEQ ID NO: 429, SEQ ID NO: 431, SEQ ID NO: 433, SEQ ID NO: 435 or SEQ ID NO: 441;
[0084] (i) introducing a nucleic acid construct capable to recombinant with a endogenous gene conferring the expression of a protein having the biological activity of a protein used in the inventive process especially a protein as depicted in SEQ ID NO: 2, SEQ ID NO: 4, SEQ ID NO: 6, SEQ ID NO: 8, SEQ ID NO: 10, SEQ ID NO: 12, SEQ ID NO: 14, SEQ ID NO: 16, SEQ ID NO: 20, SEQ ID NO: 22, SEQ ID NO: 24, SEQ ID NO: 26, SEQ ID NO: 28, SEQ ID NO. 30, SEQ ID NO: 32; SEQ ID NO: 65, SEQ ID NO: 67, SEQ ID NO: 69, SEQ ID NO: 71, SEQ ID NO: 73, SEQ ID NO: 75, SEQ ID NO: 77, SEQ ID NO: 79, SEQ ID NO: 81, SEQ ID NO: 83, SEQ ID NO: 85, SEQ ID NO: 87, SEQ ID NO: 89, SEQ ID NO: 91, SEQ ID NO: 93, SEQ ID NO: 95, SEQ ID NO: 97, SEQ ID NO: 99, SEQ ID NO: 101, SEQ ID NO: 103, SEQ ID NO: 105, SEQ ID NO: 107, SEQ ID NO: 109, SEQ ID NO: 111, SEQ ID NO: 113, SEQ ID NO: 115, SEQ ID NO: 117, SEQ ID NO: 119, SEQ ID NO: 121, SEQ ID NO: 123, SEQ ID NO: 125, SEQ ID NO: 127, SEQ ID NO: 129, SEQ ID NO: 131, SEQ ID NO: 133, SEQ ID NO: 135, SEQ ID NO: 137, SEQ ID NO: 139, SEQ ID NO: 141, SEQ ID NO: 143, SEQ ID NO: 152, SEQ ID NO: 154, SEQ ID NO: 156, SEQ ID NO: 158, SEQ ID NO: 160, SEQ ID NO: 162, SEQ ID NO: 164, SEQ ID NO: 166, SEQ ID NO: 168, SEQ ID NO: 170, SEQ ID NO: 172, SEQ ID NO: 174, SEQ ID NO: 176, SEQ ID NO: 178, SEQ ID NO: 180, SEQ ID NO: 182, SEQ ID NO: 184, SEQ ID NO: 186, SEQ ID NO: 188, SEQ ID NO: 190, SEQ ID NO: 192, SEQ ID NO: 194, SEQ ID NO: 196, SEQ ID NO: 198, SEQ ID NO: 200, SEQ ID NO: 202, SEQ ID NO: 204, SEQ ID NO: 206, SEQ ID NO: 208, SEQ ID NO: 210, SEQ ID NO: 212, SEQ ID NO: 214, SEQ ID NO: 216, SEQ ID NO: 218, SEQ ID NO: 220, SEQ ID NO: 229, SEQ ID NO:231, SEQ ID NO:233, SEQ ID NO: 235, SEQ ID NO: 237, SEQ ID NO: 239, SEQ ID NO: 241, SEQ ID NO: 243, SEQ ID NO: 250, SEQ ID NO: 252, SEQ ID NO: 254, SEQ ID NO: 256, SEQ ID NO: 258, SEQ ID NO: 260, SEQ ID NO: 262, SEQ ID NO: 264, SEQ ID NO: 266, SEQ ID NO: 268, SEQ ID NO: 270, SEQ ID NO: 272, SEQ ID NO: 283, SEQ ID NO: 285, SEQ ID NO: 287, SEQ ID NO: 289, SEQ ID NO: 291, SEQ ID NO: 293, SEQ ID NO: 295, SEQ ID NO: 297, SEQ ID NO: 299, SEQ ID NO: 301, SEQ ID NO: 303, SEQ ID NO: 305, SEQ ID NO: 307, SEQ ID NO: 309, SEQ ID NO: 311, SEQ ID NO: 313, SEQ ID NO: 315, SEQ ID NO: 317, SEQ ID NO: 319, SEQ ID NO: 321, SEQ ID NO: 323, SEQ ID NO: 325, SEQ ID NO: 327, SEQ ID NO: 329, SEQ ID NO: 331, SEQ ID NO: 333, SEQ ID NO: 335, SEQ ID NO: 337, SEQ ID NO: 339, SEQ ID NO: 341, SEQ ID NO: 343, SEQ ID NO: 345, SEQ ID NO: 347, SEQ ID NO: 349, SEQ ID NO: 351, SEQ ID NO: 353, SEQ ID NO: 355, SEQ ID NO: 357, SEQ ID NO: 359, SEQ ID NO: 361, SEQ ID NO: 363, SEQ ID NO: 365, SEQ ID NO: 367, SEQ ID NO: 369, SEQ ID NO: 371, SEQ ID NO: 373, SEQ ID NO: 375, SEQ ID NO: 377, SEQ ID NO: 379, SEQ ID NO: 381, SEQ ID NO: 383, SEQ ID NO: 385, SEQ ID NO: 387, SEQ ID NO: 389, SEQ ID NO: 391, SEQ ID NO: 393, SEQ ID NO: 395, SEQ ID NO: 397, SEQ ID NO: 399, SEQ ID NO: 401, SEQ ID NO: 403, SEQ ID NO: 405, SEQ ID NO: 407, SEQ ID NO: 409, SEQ ID NO: 411, SEQ ID NO: 413, SEQ ID NO: 415, SEQ ID NO: 417, SEQ ID NO: 419, SEQ ID NO: 421, SEQ ID NO: 423, SEQ ID NO: 425, SEQ ID NO: 427, SEQ ID NO: 429, SEQ ID NO: 431, SEQ ID NO: 433, SEQ ID NO: 435 or SEQ ID NO: 441;
[0085] (j) introducing a non-silent mutation in an endogenous gene conferring the expression of a protein having the biological activity of a protein used in the inventive process especially a protein as depicted in SEQ ID NO: 2, SEQ ID NO: 4, SEQ ID NO: 6, SEQ ID NO: 8, SEQ ID NO: 10, SEQ ID NO: 12, SEQ ID NO: 14, SEQ ID NO: 16, SEQ ID NO: 20, SEQ ID NO: 22, SEQ ID NO: 24, SEQ ID NO: 26, SEQ ID NO: 28, SEQ ID NO. 30, SEQ ID NO: 32; SEQ ID NO: 65, SEQ ID NO: 67, SEQ ID NO: 69, SEQ ID NO: 71, SEQ ID NO: 73, SEQ ID NO: 75, SEQ ID NO: 77, SEQ ID NO: 79, SEQ ID NO: 81, SEQ ID NO: 83, SEQ ID NO: 85, SEQ ID NO: 87, SEQ ID NO: 89, SEQ ID NO: 91, SEQ ID NO: 93, SEQ ID NO: 95, SEQ ID NO: 97, SEQ ID NO: 99, SEQ ID NO: 101, SEQ ID NO: 103, SEQ ID NO: 105, SEQ ID NO: 107, SEQ ID NO: 109, SEQ ID NO: 111, SEQ ID NO: 113, SEQ ID NO: 115, SEQ ID NO: 117, SEQ ID NO: 119, SEQ ID NO: 121, SEQ ID NO: 123, SEQ ID NO: 125, SEQ ID NO: 127, SEQ ID NO: 129, SEQ ID NO: 131, SEQ ID NO: 133, SEQ ID NO: 135, SEQ ID NO: 137, SEQ ID NO: 139, SEQ ID NO: 141, SEQ ID NO: 143, SEQ ID NO: 152, SEQ ID NO: 154, SEQ ID NO: 156, SEQ ID NO: 158, SEQ ID NO: 160, SEQ ID NO: 162, SEQ ID NO: 164, SEQ ID NO: 166, SEQ ID NO: 168, SEQ ID NO: 170, SEQ ID NO: 172, SEQ ID NO: 174, SEQ ID NO: 176, SEQ ID NO: 178, SEQ ID NO: 180, SEQ ID NO: 182, SEQ ID NO: 184, SEQ ID NO: 186, SEQ ID NO: 188, SEQ ID NO: 190, SEQ ID NO: 192, SEQ ID NO: 194, SEQ ID NO: 196, SEQ ID NO: 198, SEQ ID NO: 200, SEQ ID NO: 202, SEQ ID NO: 204, SEQ ID NO: 206, SEQ ID NO: 208, SEQ ID NO: 210, SEQ ID NO: 212, SEQ ID NO: 214, SEQ ID NO: 216, SEQ ID NO: 218, SEQ ID NO: 220, SEQ ID NO: 229, SEQ ID NO:231, SEQ ID NO:233, SEQ ID NO: 235, SEQ ID NO: 237, SEQ ID NO: 239, SEQ ID NO: 241, SEQ ID NO: 243, SEQ ID NO: 250, SEQ ID NO: 252, SEQ ID NO: 254, SEQ ID NO: 256, SEQ ID NO: 258, SEQ ID NO: 260, SEQ ID NO: 262, SEQ ID NO: 264, SEQ ID NO: 266, SEQ ID NO: 268, SEQ ID NO: 270, SEQ ID NO: 272, SEQ ID NO: 283, SEQ ID NO: 285, SEQ ID NO: 287, SEQ ID NO: 289, SEQ ID NO: 291, SEQ ID NO: 293, SEQ ID NO: 295, SEQ ID NO: 297, SEQ ID NO: 299, SEQ ID NO: 301, SEQ ID NO: 303, SEQ ID NO: 305, SEQ ID NO: 307, SEQ ID NO: 309, SEQ ID NO: 311, SEQ ID NO: 313, SEQ ID NO: 315, SEQ ID NO: 317, SEQ ID NO: 319, SEQ ID NO: 321, SEQ ID NO: 323, SEQ ID NO: 325, SEQ ID NO: 327, SEQ ID NO: 329, SEQ ID NO: 331, SEQ ID NO: 333, SEQ ID NO: 335, SEQ ID NO: 337, SEQ ID NO: 339, SEQ ID NO: 341, SEQ ID NO: 343, SEQ ID NO: 345, SEQ ID NO: 347, SEQ ID NO: 349, SEQ ID NO: 351, SEQ ID NO: 353, SEQ ID NO: 355, SEQ ID NO: 357, SEQ ID NO: 359, SEQ ID NO: 361, SEQ ID NO: 363, SEQ ID NO: 365, SEQ ID NO: 367, SEQ ID NO: 369, SEQ ID NO: 371, SEQ ID NO: 373, SEQ ID NO: 375, SEQ ID NO: 377, SEQ ID NO: 379, SEQ ID NO: 381, SEQ ID NO: 383, SEQ ID NO: 385, SEQ ID NO: 387, SEQ ID NO: 389, SEQ ID NO: 391, SEQ ID NO: 393, SEQ ID NO: 395, SEQ ID NO: 397, SEQ ID NO: 399, SEQ ID NO: 401, SEQ ID NO: 403, SEQ ID NO: 405, SEQ ID NO: 407, SEQ ID NO: 409, SEQ ID NO: 411, SEQ ID NO: 413, SEQ ID NO: 415, SEQ ID NO: 417, SEQ ID NO: 419, SEQ ID NO: 421, SEQ ID NO: 423, SEQ ID NO: 425, SEQ ID NO: 427, SEQ ID NO: 429, SEQ ID NO: 431, SEQ ID NO: 433, SEQ ID NO: 435 or SEQ ID NO: 441;
[0086] (k) selecting of a non-silent mutation in a nucleic acid sequence encoding a protein having the biological activity of a protein used in the inventive process especially a protein as depicted in SEQ ID NO: 2, SEQ ID NO: 4, SEQ ID NO: 6, SEQ ID NO: 8, SEQ ID NO: 10, SEQ ID NO: 12, SEQ ID NO: 14, SEQ ID NO: 16, SEQ ID NO: 20, SEQ ID NO: 22, SEQ ID NO: 24, SEQ ID NO: 26, SEQ ID NO: 28, SEQ ID NO. 30, SEQ ID NO: 32; SEQ ID NO: 65, SEQ ID NO: 67, SEQ ID NO: 69, SEQ ID NO: 71, SEQ ID NO: 73, SEQ ID NO: 75, SEQ ID NO: 77, SEQ ID NO: 79, SEQ ID NO: 81, SEQ ID NO: 83, SEQ ID NO: 85, SEQ ID NO: 87, SEQ ID NO: 89, SEQ ID NO: 91, SEQ ID NO: 93, SEQ ID NO: 95, SEQ ID NO: 97, SEQ ID NO: 99, SEQ ID NO: 101, SEQ ID NO: 103, SEQ ID NO: 105, SEQ ID NO: 107, SEQ ID NO: 109, SEQ ID NO: 111, SEQ ID NO: 113, SEQ ID NO: 115, SEQ ID NO: 117, SEQ ID NO: 119, SEQ ID NO: 121, SEQ ID NO: 123, SEQ ID NO: 125, SEQ ID NO: 127, SEQ ID NO: 129, SEQ ID NO: 131, SEQ ID NO: 133, SEQ ID NO: 135, SEQ ID NO: 137, SEQ ID NO: 139, SEQ ID NO: 141, SEQ ID NO: 143, SEQ ID NO: 152, SEQ ID NO: 154, SEQ ID NO: 156, SEQ ID NO: 158, SEQ ID NO: 160, SEQ ID NO: 162, SEQ ID NO: 164, SEQ ID NO: 166, SEQ ID NO: 168, SEQ ID NO: 170, SEQ ID NO: 172, SEQ ID NO: 174, SEQ ID NO: 176, SEQ ID NO: 178, SEQ ID NO: 180, SEQ ID NO: 182, SEQ ID NO: 184, SEQ ID NO: 186, SEQ ID NO: 188, SEQ ID NO: 190, SEQ ID NO: 192, SEQ ID NO: 194, SEQ ID NO: 196, SEQ ID NO: 198, SEQ ID NO: 200, SEQ ID NO: 202, SEQ ID NO: 204, SEQ ID NO: 206, SEQ ID NO: 208, SEQ ID NO: 210, SEQ ID NO: 212, SEQ ID NO: 214, SEQ ID NO: 216, SEQ ID NO: 218, SEQ ID NO: 220, SEQ ID NO: 229, SEQ ID NO:231, SEQ ID NO:233, SEQ ID NO: 235, SEQ ID NO: 237, SEQ ID NO: 239, SEQ ID NO: 241, SEQ ID NO: 243, SEQ ID NO: 250, SEQ ID NO: 252, SEQ ID NO: 254, SEQ ID NO: 256, SEQ ID NO: 258, SEQ ID NO: 260, SEQ ID NO: 262, SEQ ID NO: 264, SEQ ID NO: 266, SEQ ID NO: 268, SEQ ID NO: 270, SEQ ID NO: 272, SEQ ID NO: 283, SEQ ID NO: 285, SEQ ID NO: 287, SEQ ID NO: 289, SEQ ID NO: 291, SEQ ID NO: 293, SEQ ID NO: 295, SEQ ID NO: 297, SEQ ID NO: 299, SEQ ID NO: 301, SEQ ID NO: 303, SEQ ID NO: 305, SEQ ID NO: 307, SEQ ID NO: 309, SEQ ID NO: 311, SEQ ID NO: 313, SEQ ID NO: 315, SEQ ID NO: 317, SEQ ID NO: 319, SEQ ID NO: 321, SEQ ID NO: 323, SEQ ID NO: 325, SEQ ID NO: 327, SEQ ID NO: 329, SEQ ID NO: 331, SEQ ID NO: 333, SEQ ID NO: 335, SEQ ID NO: 337, SEQ ID NO: 339, SEQ ID NO: 341, SEQ ID NO: 343, SEQ ID NO: 345, SEQ ID NO: 347, SEQ ID NO: 349, SEQ ID NO: 351, SEQ ID NO: 353, SEQ ID NO: 355, SEQ ID NO: 357, SEQ ID NO: 359, SEQ ID NO: 361, SEQ ID NO: 363, SEQ ID NO: 365, SEQ ID NO: 367, SEQ ID NO: 369, SEQ ID NO: 371, SEQ ID NO: 373, SEQ ID NO: 375, SEQ ID NO: 377, SEQ ID NO: 379, SEQ ID NO: 381, SEQ ID NO: 383, SEQ ID NO: 385, SEQ ID NO: 387, SEQ ID NO: 389, SEQ ID NO: 391, SEQ ID NO: 393, SEQ ID NO: 395, SEQ ID NO: 397, SEQ ID NO: 399, SEQ ID NO: 401, SEQ ID NO: 403, SEQ ID NO: 405, SEQ ID NO: 407, SEQ ID NO: 409, SEQ ID NO: 411, SEQ ID NO: 413, SEQ ID NO: 415, SEQ ID NO: 417, SEQ ID NO: 419, SEQ ID NO: 421, SEQ ID NO: 423, SEQ ID NO: 425, SEQ ID NO: 427, SEQ ID NO: 429, SEQ ID NO: 431, SEQ ID NO: 433, SEQ ID NO: 435 or SEQ ID NO: 441 from a randomly mutagenized population of organisms used in the inventive process; and/or
[0087] (l) introducing an expression construct conferring the expression of nucleic acid molecule characterized in any one of (a) to (k).

[0088] As the skilled person knows it is possible starting from the nucleic acid sequences mentioned under point (a) to (j) above it is easy possible to isolate the 5′- and/or 3′-regions of said nucleic acid sequences and to use said 5′- and/or 3′-sequences for the reduction, decrease or deletion of the nucleic acid sequences used in the inventive process according to the different process steps (a) to (j) mentioned above. Preferably less than 1000 bp, 900 bp, 800 bp or 700 bp, particular preferably less than 600 bp, 500 bp, 400 bp, 300 bp, 200 bp or 100 bp of the 5′- and/or 3′-region of the said nucleic acid sequence are used.

[0089] The aforementioned process steps of the reduction or deletion of the biological activity represented by the protein of the invention lead to an increase of the production of the fine chemical.

[0090] A reduction in the activity or the function is preferably achieved by a reduced expression of a gene encoding the protein of the inventive process.

[0091] Further preferred embodiments of the invention to reduce the biological activity of the protein of the inventive process, said reduction of the activity or function can be achieved using the following methods:
[0092] a) introduction of a double-stranded RNA nucleic acid sequence (dsRNA) as described above or of an expression cassette, or more than one expression cassette, ensuring the expression of the latter;
[0093] b) introduction of an antisense nucleic acid sequence or of an expression cassette ensuring the expression of the latter. Encompassed are those methods in which the antisense nucleic acid sequence is directed against a gene (i.e. genomic DNA sequences) or a gene transcript (i.e. RNA sequences) including the 5′ and 3′non-translated regions. Also encompassed are α-anomeric nucleic acid sequences;
[0094] c) introduction of an antisense nucleic acid sequence in combination with a ribozyme or of an expression cassette ensuring the expression of the former;
[0095] d) introduction of sense nucleic acid sequences for inducing cosuppression or of an expression cassette ensuring the expression of the former;
[0096] e) introduction of a nucleic acid sequence encoding dominant-negative protein or of an expression cassette ensuring the expression of the latter;
[0097] f) introduction of DNA-, RNA- or protein-binding factors against genes, RNA's or proteins or of an expression cassette ensuring the expression of the latter;
[0098] g) introduction of viral nucleic acid sequences and expression constructs which bring about the degradation of RNA, or of an expression cassette ensuring the expression of the former;
[0099] h) introduction of constructs for inducing homologous recombination on endogenous genes, for example for generating knockout mutants;
[0100] i) introduction of mutations into endogenous genes for generating a loss of function (e.g. generation of stop codons, reading-frame shifts and the like); and/or
[0101] j) identifying a non silent mutation e.g. generation of stop codons, reading-frame shifts, inversions and the like in random mutagenized population according to the so called tilling method.

[0102] Each of these methods may bring about a reduction in the expression, the activity or the function for the purposes of the invention. A combined use is also feasible. Further methods are known to the skilled worker and may encompass hindering or preventing processing of the protein, transport of the protein or its mRNA, inhibition of ribosomal attachment, inhibition of RNA splicing, induction of an enzyme which degrades RNA or the protein of the invention and/or inhibition of translational elongation or termination.

[0103] What follows is a brief description of the individual preferred methods:

[0104] A) Introduction of a Double-Stranded RNA Nucleic Acid Sequence (dsRNA)

[0105] The method of regulating genes by means of double-stranded RNA (“double-stranded RNA interference”; dsRNAi) has been described extensively for animal, yeast, fungi and plant organisms such as Neurospora, Zebrafish, Drosophila, mice, planaria, humans, Trypanosoma, petunia or Arabidopsis (for example Matzke M A et al. (2000) Plant Mol. Biol. 43: 401-415; Fire A. et al. (1998) Nature 391: 806-811; WO 99/32619; WO 99/53050; WO 00/68374; WO 00/44914; WO 00/44895; WO 00/49035; WO 00/63364). In addition RNAi is also documented as an advantageously tool for the repression of genes in bacteria such as E. coli for example by Tchurikov et al. [J. Biol. Chem., 2000, 275 (34): 26523-26529]. Fire et al. named the phenomenon RNAi for RNA interference. The techniques and methods described in the above references are expressly referred to. Efficient gene suppression can also be observed in the case of transient expression or following transient transformation, for example as the consequence of a biolistic transformation (Schweizer P et al. (2000) Plant J 2000 24: 895-903). dsRNAi methods are based on the phenomenon that the simultaneous introduction of complementary strand and counterstrand of a gene transcript brings about highly effective suppression of the expression of the gene in question. The resulting phenotype is very similar to that of an analogous knock-out mutant (Waterhouse P M et al. (1998) Proc. Natl. Acad. Sci. USA 95: 13959-64).

[0106] Tuschl et al. [Gens Dev., 1999, 13 (24): 3191-3197] was able to show that the efficiency of the RNAi method is a function of the length of the duplex, the length of the 3′-end overhangs, and the sequence in these overhangs. Based on the work of Tuschl et al. and assuming that the underlining principles are conserved between different species the following guidelines can be given to the skilled worker:
[0107] to achieve good results the 5′ and 3′ untranslated regions of the used nucleic acid sequence and regions close to the start codon should be in general avoided as this regions are richer in regulatory protein binding sites and interactions between RNAi sequences and such regulatory proteins might lead to undesired interactions;
[0108] in plants the 5′ and 3′ untranslated regions of the used nucleic acid sequence and regions close to the start codon preferably 50 to 100 nt upstream of the start codon give good results and therefore should not be avoided;
[0109] preferably a region of the used mRNA is selected, which is 50 to 100 nt (=nucleotides or bases) downstream of the AUG start codon;
[0110] only dsRNA (=double-stranded RNA) sequences from exons are useful for the method, as sequences from introns have no effect;
[0111] the G/C content in this region should be greater than 30% and less than 70% ideally around 50%;
[0112] a possible secondary structure of the target mRNA is less important for the effect of the RNAi method.

[0113] The dsRNAi method has proved to be particularly effective and advantageous for reducing the expression of the nucleic acid sequences of the SEQ ID NO: 1, SEQ ID NO: 3, SEQ ID NO: 5, SEQ ID NO: 7, SEQ ID NO: 9, SEQ ID NO: 11, SEQ ID NO: 13, SEQ ID NO: 15, SEQ ID NO: 19, SEQ ID NO: 21, SEQ ID NO: 23, SEQ ID NO: 25, SEQ ID NO: 27, SEQ ID NO: 29, SEQ ID NO: 31; SEQ ID NO: 64, SEQ ID NO: 66, SEQ ID NO: 68, SEQ ID NO: 70, SEQ ID NO: 72, SEQ ID NO: 74, SEQ ID NO: 76, SEQ ID NO: 78, SEQ ID NO: 80, SEQ ID NO: 82, SEQ ID NO: 84, SEQ ID NO: 86, SEQ ID NO: 88, SEQ ID NO: 90, SEQ ID NO: 92, SEQ ID NO: 94, SEQ ID NO: 96, SEQ ID NO: 98, SEQ ID NO: 100, SEQ ID NO: 102, SEQ ID NO: 104, SEQ ID NO: 106, SEQ ID NO: 108, SEQ ID NO: 110, SEQ ID NO: 112, SEQ ID NO: 114, SEQ ID NO: 116, SEQ ID NO: 118, SEQ ID NO: 120, SEQ ID NO: 122, SEQ ID NO: 124, SEQ ID NO: 126, SEQ ID NO: 128, SEQ ID NO: 130, SEQ ID NO: 132, SEQ ID NO: 134, SEQ ID NO: 136, SEQ ID NO: 138, SEQ ID NO: 140, SEQ ID NO: , SEQ ID NO: 142, SEQ ID NO: 151, SEQ ID NO: 153, SEQ ID NO: 155, SEQ ID NO: 157, SEQ ID NO: 159, SEQ ID NO: 161, SEQ ID NO: 163, SEQ ID NO: 165, SEQ ID NO: 167, SEQ ID NO: 169, SEQ ID NO: 171, SEQ ID NO: 173, SEQ ID NO: 175, SEQ ID NO: 177, SEQ ID NO: 179, SEQ ID NO: 181, SEQ ID NO: 183, SEQ ID NO: 185, SEQ ID NO: 187, SEQ ID NO: 189, SEQ ID NO: 191, SEQ ID NO: 193, SEQ ID NO: 195, SEQ ID NO: 197, SEQ ID NO: 199, SEQ ID NO: 201, SEQ ID NO: 203, SEQ ID NO: 205, SEQ ID NO: 207, SEQ ID NO: 209, SEQ ID NO: 211, SEQ ID NO: 213, SEQ ID NO: 215, SEQ ID NO: 217, SEQ ID NO: 219, SEQ ID NO: 228, SEQ ID NO: 230, SEQ ID NO: 232, SEQ ID NO: 234, SEQ ID NO: 236, SEQ ID NO: 238, SEQ ID NO: 240, SEQ ID NO: 242, SEQ ID NO: 249, SEQ ID NO: 251, SEQ ID NO: 253, SEQ ID NO: 255, SEQ ID NO: 257, SEQ ID NO: 259, SEQ ID NO: 261, SEQ ID NO: 263, SEQ ID NO: 265, SEQ ID NO: 267, SEQ ID NO: 269, SEQ ID NO: 271, SEQ ID NO: 282, SEQ ID NO: 284, SEQ ID NO: 286, SEQ ID NO: 288, SEQ ID NO: 290, SEQ ID NO: 292, SEQ ID NO: 294, SEQ ID NO: 296, SEQ ID NO: 298, SEQ ID NO: 300, SEQ ID NO: 302, SEQ ID NO: 304, SEQ ID NO: 306, SEQ ID NO: 308, SEQ ID NO: 310, SEQ ID NO: 312, SEQ ID NO: 314, SEQ ID NO: 316, SEQ ID NO: 318, SEQ ID NO: 320, SEQ ID NO: 322, SEQ ID NO: 324, SEQ ID NO: 326, SEQ ID NO: 328, SEQ ID NO: 330, SEQ ID NO: 332, SEQ ID NO: 334, SEQ ID NO: 336, SEQ ID NO: 338, SEQ ID NO: 340, SEQ ID NO: 342, SEQ ID NO: 344, SEQ ID NO: 346, SEQ ID NO: 348, SEQ ID NO: 350, SEQ ID NO: 352, SEQ ID NO: 354, SEQ ID NO: 356, SEQ ID NO: 358, SEQ ID NO: 360, SEQ ID NO: 362, SEQ ID NO: 364, SEQ ID NO: 366, SEQ ID NO: 368, SEQ ID NO: 370, SEQ ID NO: 372, SEQ ID NO: 374, SEQ ID NO: 376, SEQ ID NO: 378, SEQ ID NO: 380, SEQ ID NO: 382, SEQ ID NO: 384, SEQ ID NO: 386, SEQ ID NO: 388, SEQ ID NO: 390, SEQ ID NO: 392, SEQ ID NO: 394, SEQ ID NO: 396, SEQ ID NO: 398, SEQ ID NO: 400, SEQ ID NO: 402, SEQ ID NO: 404, SEQ ID NO: 406, SEQ ID NO: 408, SEQ ID NO: 410, SEQ ID NO: 412, SEQ ID NO: 414, SEQ ID NO: 416, SEQ ID NO: 418, SEQ ID NO: 420, SEQ ID NO: 422, SEQ ID NO: 424, SEQ ID NO: 426, SEQ ID NO: 428, SEQ ID NO: 430, SEQ ID NO: 432, SEQ ID NO: 434 or SEQ ID NO: 440 and/or homologs thereof. As described inter alia in WO 99/32619, dsRNAi approaches are clearly superior to traditional antisense approaches.

[0114] The invention therefore furthermore relates to double-stranded RNA molecules (dsRNA molecules) which, when introduced into an organism, advantageously into a plant (or a cell, tissue, organ or seed derived therefrom), bring about altered metabolic activity by the reduction in the expression of the nucleic acid sequences of the SEQ ID NO: 1, SEQ ID NO: 3, SEQ ID NO: 5, SEQ ID NO: 7, SEQ ID NO: 9, SEQ ID NO: 11, SEQ ID NO: 13, SEQ ID NO: 15, SEQ ID NO: 19, SEQ ID NO: 21, SEQ ID NO: 23, SEQ ID NO: 25, SEQ ID NO: 27, SEQ ID NO: 29, SEQ ID NO: 31; SEQ ID NO: 64, SEQ ID NO: 66, SEQ ID NO: 68, SEQ ID NO: 70, SEQ ID NO: 72, SEQ ID NO: 74, SEQ ID NO: 76, SEQ ID NO: 78, SEQ ID NO: 80, SEQ ID NO: 82, SEQ ID NO: 84, SEQ ID NO: 86, SEQ ID NO: 88, SEQ ID NO: 90, SEQ ID NO: 92, SEQ ID NO: 94, SEQ ID NO: 96, SEQ ID NO: 98, SEQ ID NO: 100, SEQ ID NO: 102, SEQ ID NO: 104, SEQ ID NO: 106, SEQ ID NO: 108, SEQ ID NO: 110, SEQ ID NO: 112, SEQ ID NO: 114, SEQ ID NO: 116, SEQ ID NO: 118, SEQ ID NO: 120, SEQ ID NO: 122, SEQ ID NO: 124, SEQ ID NO: 126, SEQ ID NO: 128, SEQ ID NO: 130, SEQ ID NO: 132, SEQ ID NO: 134, SEQ ID NO: 136, SEQ ID NO: 138, SEQ ID NO: 140, SEQ ID NO: , SEQ ID NO: 142, SEQ ID NO: 151, SEQ ID NO: 153, SEQ ID NO: 155, SEQ ID NO: 157, SEQ ID NO: 159, SEQ ID NO: 161, SEQ ID NO: 163, SEQ ID NO: 165, SEQ ID NO: 167, SEQ ID NO: 169, SEQ ID NO: 171, SEQ ID NO: 173, SEQ ID NO: 175, SEQ ID NO: 177, SEQ ID NO: 179, SEQ ID NO: 181, SEQ ID NO: 183, SEQ ID NO: 185, SEQ ID NO: 187, SEQ ID NO: 189, SEQ ID NO: 191, SEQ ID NO: 193, SEQ ID NO: 195, SEQ ID NO: 197, SEQ ID NO: 199, SEQ ID NO: 201, SEQ ID NO: 203, SEQ ID NO: 205, SEQ ID NO: 207, SEQ ID NO: 209, SEQ ID NO: 211, SEQ ID NO: 213, SEQ ID NO: 215, SEQ ID NO: 217, SEQ ID NO: 219, SEQ ID NO: 228, SEQ ID NO: 230, SEQ ID NO: 232, SEQ ID NO: 234, SEQ ID NO: 236, SEQ ID NO: 238, SEQ ID NO: 240, SEQ ID NO: 242, SEQ ID NO: 249, SEQ ID NO: 251, SEQ ID NO: 253, SEQ ID NO: 255, SEQ ID NO: 257, SEQ ID NO: 259, SEQ ID NO: 261, SEQ ID NO: 263, SEQ ID NO: 265, SEQ ID NO: 267, SEQ ID NO: 269, SEQ ID NO: 271, SEQ ID NO: 282, SEQ ID NO: 284, SEQ ID NO: 286, SEQ ID NO: 288, SEQ ID NO: 290, SEQ ID NO: 292, SEQ ID NO: 294, SEQ ID NO: 296, SEQ ID NO: 298, SEQ ID NO: 300, SEQ ID NO: 302, SEQ ID NO: 304, SEQ ID NO: 306, SEQ ID NO: 308, SEQ ID NO: 310, SEQ ID NO: 312, SEQ ID NO: 314, SEQ ID NO: 316, SEQ ID NO: 318, SEQ ID NO: 320, SEQ ID NO: 322, SEQ ID NO: 324, SEQ ID NO: 326, SEQ ID NO: 328, SEQ ID NO: 330, SEQ ID NO: 332, SEQ ID NO: 334, SEQ ID NO: 336, SEQ ID NO: 338, SEQ ID NO: 340, SEQ ID NO: 342, SEQ ID NO: 344, SEQ ID NO: 346, SEQ ID NO: 348, SEQ ID NO: 350, SEQ ID NO: 352, SEQ ID NO: 354, SEQ ID NO: 356, SEQ ID NO: 358, SEQ ID NO: 360, SEQ ID NO: 362, SEQ ID NO: 364, SEQ ID NO: 366, SEQ ID NO: 368, SEQ ID NO: 370, SEQ ID NO: 372, SEQ ID NO: 374, SEQ ID NO: 376, SEQ ID NO: 378, SEQ ID NO: 380, SEQ ID NO: 382, SEQ ID NO: 384, SEQ ID NO: 386, SEQ ID NO: 388, SEQ ID NO: 390, SEQ ID NO: 392, SEQ ID NO: 394, SEQ ID NO: 396, SEQ ID NO: 398, SEQ ID NO: 400, SEQ ID NO: 402, SEQ ID NO: 404, SEQ ID NO: 406, SEQ ID NO: 408, SEQ ID NO: 410, SEQ ID NO: 412, SEQ ID NO: 414, SEQ ID NO: 416, SEQ ID NO: 418, SEQ ID NO: 420, SEQ ID NO: 422, SEQ ID NO: 424, SEQ ID NO: 426, SEQ ID NO: 428, SEQ ID NO: 430, SEQ ID NO: 432, SEQ ID NO: 434 or SEQ ID NO: 440 and/or homologs thereof. In a double-stranded RNA molecule for reducing the expression of an protein encoded by a nucleic acid sequence of one of the SEQ ID NO: 1, SEQ ID NO: 3, SEQ ID NO: 5, SEQ ID NO: 7, SEQ ID NO: 9, SEQ ID NO: 11, SEQ ID NO: 13, SEQ ID NO: 15, SEQ ID NO: 19, SEQ ID NO: 21, SEQ ID NO: 23, SEQ ID NO: 25, SEQ ID NO: 27, SEQ ID NO: 29, SEQ ID NO: 31; SEQ ID NO: 64, SEQ ID NO: 66, SEQ ID NO: 68, SEQ ID NO: 70, SEQ ID NO: 72, SEQ ID NO: 74, SEQ ID NO: 76, SEQ ID NO: 78, SEQ ID NO: 80, SEQ ID NO: 82, SEQ ID NO: 84, SEQ ID NO: 86, SEQ ID NO: 88, SEQ ID NO: 90, SEQ ID NO: 92, SEQ ID NO: 94, SEQ ID NO: 96, SEQ ID NO: 98, SEQ ID NO: 100, SEQ ID NO: 102, SEQ ID NO: 104, SEQ ID NO: 106, SEQ ID NO: 108, SEQ ID NO: 110, SEQ ID NO: 112, SEQ ID NO: 114, SEQ ID NO: 116, SEQ ID NO: 118, SEQ ID NO: 120, SEQ ID NO: 122, SEQ ID NO: 124, SEQ ID NO: 126, SEQ ID NO: 128, SEQ ID NO: 130, SEQ ID NO: 132, SEQ ID NO: 134, SEQ ID NO: 136, SEQ ID NO: 138, SEQ ID NO: 140, SEQ ID NO: , SEQ ID NO: 142, SEQ ID NO: 151, SEQ ID NO: 153, SEQ ID NO: 155, SEQ ID NO: 157, SEQ ID NO: 159, SEQ ID NO: 161, SEQ ID NO: 163, SEQ ID NO: 165, SEQ ID NO: 167, SEQ ID NO: 169, SEQ ID NO: 171, SEQ ID NO: 173, SEQ ID NO: 175, SEQ ID NO: 177, SEQ ID NO: 179, SEQ ID NO: 181, SEQ ID NO: 183, SEQ ID NO: 185, SEQ ID NO: 187, SEQ ID NO: 189, SEQ ID NO: 191, SEQ ID NO: 193, SEQ ID NO: 195, SEQ ID NO: 197, SEQ ID NO: 199, SEQ ID NO: 201, SEQ ID NO: 203, SEQ ID NO: 205, SEQ ID NO: 207, SEQ ID NO: 209, SEQ ID NO: 211, SEQ ID NO: 213, SEQ ID NO: 215, SEQ ID NO: 217, SEQ ID NO: 219, SEQ ID NO: 228, SEQ ID NO: 230, SEQ ID NO: 232, SEQ ID NO: 234, SEQ ID NO: 236, SEQ ID NO: 238, SEQ ID NO: 240, SEQ ID NO: 242, SEQ ID NO: 249, SEQ ID NO: 251, SEQ ID NO: 253, SEQ ID NO: 255, SEQ ID NO: 257, SEQ ID NO: 259, SEQ ID NO: 261, SEQ ID NO: 263, SEQ ID NO: 265, SEQ ID NO: 267, SEQ ID NO: 269, SEQ ID NO: 271, SEQ ID NO: 282, SEQ ID NO: 284, SEQ ID NO: 286, SEQ ID NO: 288, SEQ ID NO: 290, SEQ ID NO: 292, SEQ ID NO: 294, SEQ ID NO: 296, SEQ ID NO: 298, SEQ ID NO: 300, SEQ ID NO: 302, SEQ ID NO: 304, SEQ ID NO: 306, SEQ ID NO: 308, SEQ ID NO: 310, SEQ ID NO: 312, SEQ ID NO: 314, SEQ ID NO: 316, SEQ ID NO: 318, SEQ ID NO: 320, SEQ ID NO: 322, SEQ ID NO: 324, SEQ ID NO: 326, SEQ ID NO: 328, SEQ ID NO: 330, SEQ ID NO: 332, SEQ ID NO: 334, SEQ ID NO: 336, SEQ ID NO: 338, SEQ ID NO: 340, SEQ ID NO: 342, SEQ ID NO: 344, SEQ ID NO: 346, SEQ ID NO: 348, SEQ ID NO: 350, SEQ ID NO: 352, SEQ ID NO: 354, SEQ ID NO: 356, SEQ ID NO: 358, SEQ ID NO: 360, SEQ ID NO: 362, SEQ ID NO: 364, SEQ ID NO: 366, SEQ ID NO: 368, SEQ ID NO: 370, SEQ ID NO: 372, SEQ ID NO: 374, SEQ ID NO: 376, SEQ ID NO: 378, SEQ ID NO: 380, SEQ ID NO: 382, SEQ ID NO: 384, SEQ ID NO: 386, SEQ ID NO: 388, SEQ ID NO: 390, SEQ ID NO: 392, SEQ ID NO: 394, SEQ ID NO: 396, SEQ ID NO: 398, SEQ ID NO: 400, SEQ ID NO: 402, SEQ ID NO: 404, SEQ ID NO: 406, SEQ ID NO: 408, SEQ ID NO: 410, SEQ ID NO: 412, SEQ ID NO: 414, SEQ ID NO: 416, SEQ ID NO: 418, SEQ ID NO: 420, SEQ ID NO: 422, SEQ ID NO: 424, SEQ ID NO: 426, SEQ ID NO: 428, SEQ ID NO: 430, SEQ ID NO: 432, SEQ ID NO: 434 or SEQ ID NO: 440 and/or homologs thereof,
[0115] i) one of the two RNA strands is essentially identical to at least part of a nucleic acid sequence, and
[0116] ii) the respective other RNA strand is essentially identical to at least part of the complementary strand of a nucleic acid sequence.

[0117] The term “essentially identical” refers to the fact that the dsRNA sequence may also include insertions, deletions and individual point mutations in comparison to the target sequence while still bringing about an effective reduction in expression. Preferably, the homology as defined above amounts to at least 30%, preferably at least 40%, 50%, 60%, 70% or 80%, very especially preferably at least 90%, most preferably 100%, between the “sense” strand of an inhibitory dsRNA and a part-segment of a nucleic acid sequence of the invention including in a preferred embodiment of the invention their endogenous 5′- and 3′untranslated regions or between the “antisense” strand and the complementary strand of a nucleic acid sequence, respectively. The part-segment amounts to at least 10 bases, preferably at least 17, 18, 19, 20, 21, 22, 23, 24, 25, 26, 27, 28, 29 or 30 bases, especially preferably at least 40, 50, 60, 70, 80 or 90 bases, very especially preferably at least 100, 200, 300 or 400 bases, most preferably at least 500, 600, 700, 800, 900 or more bases or at least 1000 or 2000 bases or more in length. In another preferred embodiment of the invention the part-segment amounts to 17, 18, 19, 20, 21, 22, 23, 24, 25, 26 or 27 bases, preferably to 20, 21, 22, 23, 24 or 25 bases. These short sequences are preferred in animals and plants. The longer sequences preferably between 200 and 800 bases are preferred in nonmammalian animals, preferably in invertebrates, in yeast, fungi or bacteria, but they are also useable in plants. Long double-stranded RNAs are processed in the organisms into many siRNAs (=small/short interfering RNAs) for example by the protein Dicer, which is a ds-specific Rnase III enzyme. As an alternative, an “essentially identical” dsRNA may also be defined as a nucleic acid sequence, which is capable of hybridizing with part of a gene transcript (for example in 400 mM NaCl, 40 mM PIPES pH 6.4, 1 mM EDTA at 50° C. or 70° C. for 12 to 16 h).

[0118] The dsRNA may consist of one or more strands of polymerized ribonucleotides. Modification of both the sugar-phosphate backbone and of the nucleosides may furthermore be present. For example, the phosphodiester bonds of the natural RNA can be modified in such a way that they encompass at least one nitrogen or sulfur hetero atom. Bases may undergo modification in such a way that the activity of, for example, adenosine deaminase is restricted. These and other modifications are described herein below in the methods for stabilizing antisense RNA.

[0119] The dsRNA can be prepared enzymatically; it may also be synthesized chemically, either in full or in part. Short dsRNA up to 30 bp, which effectively mediate RNA interference, can be for example efficiently generated by partial digestion of long dsRNA templates using E. coli ribonuclease III (RNase III). (Yang, D., et al. (2002) Proc. Natl. Acad. Sci. USA 99, 9942.)

[0120] The double-stranded structure can be formed starting from a single, self-complementary strand or starting from two complementary strands. In a single, self-complementary strand, “sense” and “antisense” sequence can be linked by a linking sequence (“linker”) and form for example a hairpin structure. Preferably, the linking sequence may take the form of an intron, which is spliced out following dsRNA synthesis. The nucleic acid sequence encoding a dsRNA may contain further elements such as, for example, transcription termination signals or polyadenylation signals. If the two strands of the dsRNA are to be combined in a cell or an organism advantageously in a plant, this can be brought about in a variety of ways:
[0121] a) transformation of the cell or of the organism, advantageously of a plant, with a vector encompassing the two expression cassettes;
[0122] b) cotransformation of the cell or of the organism, advantageously of a plant, with two vectors, one of which encompasses the expression cassettes with the “sense” strand while the other encompasses the expression cassettes with the “antisense” strand;
[0123] c) supertransformation of the cell or of the organism, advantageously of a plant, with a vector encompassing the expression cassettes with the “sense” strand, after the cell or the organism had already been transformed with a vector encompassing the expression cassettes with the “antisense” strand;
[0124] d) hybridization e.g. crossing of two organisms, advantageously of plants, each of which has been transformed with one vector, one of which encompasses the expression cassettes with the “sense” strand while the other encompasses the expression cassettes with the “antisense” strand;
[0125] e) introduction of a construct comprising two promoters that lead to transcription of the desired sequence from both directions; and/or
[0126] f) infecting of the cell or of the organism with, advantageously of a plant, with an engineered virus, which is able to produce the desired dsRNA molecule.

[0127] Formation of the RNA duplex can be initiated either outside the cell or within the cell. If the dsRNA is synthesized outside the target cell or organism it can be introduced into the organism or a cell of the organism by injection, microinjection, electroporation, high velocity particles, by laser beam or mediated by chemical compounds (DEAE-dextran, calciumphosphate, liposomes) or in case of animals it is also possible to feed bacteria such as E. coli strains engineered to express double-stranded RNAi to the animals.

[0128] As shown in WO 99/53050, the dsRNA may also encompass a hairpin structure, by linking the “sense” and “antisense” strands by a “linker” (for example an intron). The self-complementary dsRNA structures are preferred since they merely require the expression of a construct and always encompass the complementary strands in an equimolar ratio.

[0129] The expression cassettes encoding the “antisense” or the “sense” strand of the dsRNA or the self-complementary strand of the dsRNA are preferably inserted into a vector and stably inserted into the genome of a plant, using the methods described herein below (for example using selection markers), in order to ensure permanent expression of the dsRNA. Transient expression with bacterial or viral vectors are similar useful.

[0130] The dsRNA can be introduced using an amount which makes possible at least one copy per cell. A larger amount (for example at least 5, 10, 100, 500 or 1 000 copies per cell) may bring about more efficient reduction.

[0131] As has already been described, 100% sequence identity between the dsRNA and a gene transcript of a nucleic acid sequence of one of the SEQ ID NO: 1, SEQ ID NO: 3, SEQ ID NO: 5, SEQ ID NO: 7, SEQ ID NO: 9, SEQ ID NO: 11, SEQ ID NO: 13, SEQ ID NO: 15, SEQ ID NO: 19, SEQ ID NO: 21, SEQ ID NO: 23, SEQ ID NO: 25, SEQ ID NO: 27, SEQ ID NO: 29, SEQ ID NO: 31; SEQ ID NO: 64, SEQ ID NO: 66, SEQ ID NO: 68, SEQ ID NO: 70, SEQ ID NO: 72, SEQ ID NO: 74, SEQ ID NO: 76, SEQ ID NO: 78, SEQ ID NO: 80, SEQ ID NO: 82, SEQ ID NO: 84, SEQ ID NO: 86, SEQ ID NO: 88, SEQ ID NO: 90, SEQ ID NO: 92, SEQ ID NO: 94, SEQ ID NO: 96, SEQ ID NO: 98, SEQ ID NO: 100, SEQ ID NO: 102, SEQ ID NO: 104, SEQ ID NO: 106, SEQ ID NO: 108, SEQ ID NO: 110, SEQ ID NO: 112, SEQ ID NO: 114, SEQ ID NO: 116, SEQ ID NO: 118, SEQ ID NO: 120, SEQ ID NO: 122, SEQ ID NO: 124, SEQ ID NO: 126, SEQ ID NO: 128, SEQ ID NO: 130, SEQ ID NO: 132, SEQ ID NO: 134, SEQ ID NO: 136, SEQ ID NO: 138, SEQ ID NO: 140, SEQ ID NO: , SEQ ID NO: 142, SEQ ID NO: 151, SEQ ID NO: 153, SEQ ID NO: 155, SEQ ID NO: 157, SEQ ID NO: 159, SEQ ID NO: 161, SEQ ID NO: 163, SEQ ID NO: 165, SEQ ID NO: 167, SEQ ID NO: 169, SEQ ID NO: 171, SEQ ID NO: 173, SEQ ID NO: 175, SEQ ID NO: 177, SEQ ID NO: 179, SEQ ID NO: 181, SEQ ID NO: 183, SEQ ID NO: 185, SEQ ID NO: 187, SEQ ID NO: 189, SEQ ID NO: 191, SEQ ID NO: 193, SEQ ID NO: 195, SEQ ID NO: 197, SEQ ID NO: 199, SEQ ID NO: 201, SEQ ID NO: 203, SEQ ID NO: 205, SEQ ID NO: 207, SEQ ID NO: 209, SEQ ID NO: 211, SEQ ID NO: 213, SEQ ID NO: 215, SEQ ID NO: 217, SEQ ID NO: 219, SEQ ID NO: 228, SEQ ID NO: 230, SEQ ID NO: 232, SEQ ID NO: 234, SEQ ID NO: 236, SEQ ID NO: 238, SEQ ID NO: 240, SEQ ID NO: 242, SEQ ID NO: 249, SEQ ID NO: 251, SEQ ID NO: 253, SEQ ID NO: 255, SEQ ID NO: 257, SEQ ID NO: 259, SEQ ID NO: 261, SEQ ID NO: 263, SEQ ID NO: 265, SEQ ID NO: 267, SEQ ID NO: 269, SEQ ID NO: 271, SEQ ID NO: 282, SEQ ID NO: 284, SEQ ID NO: 286, SEQ ID NO: 288, SEQ ID NO: 290, SEQ ID NO: 292, SEQ ID NO: 294, SEQ ID NO: 296, SEQ ID NO: 298, SEQ ID NO: 300, SEQ ID NO: 302, SEQ ID NO: 304, SEQ ID NO: 306, SEQ ID NO: 308, SEQ ID NO: 310, SEQ ID NO: 312, SEQ ID NO: 314, SEQ ID NO: 316, SEQ ID NO: 318, SEQ ID NO: 320, SEQ ID NO: 322, SEQ ID NO: 324, SEQ ID NO: 326, SEQ ID NO: 328, SEQ ID NO: 330, SEQ ID NO: 332, SEQ ID NO: 334, SEQ ID NO: 336, SEQ ID NO: 338, SEQ ID NO: 340, SEQ ID NO: 342, SEQ ID NO: 344, SEQ ID NO: 346, SEQ ID NO: 348, SEQ ID NO: 350, SEQ ID NO: 352, SEQ ID NO: 354, SEQ ID NO: 356, SEQ ID NO: 358, SEQ ID NO: 360, SEQ ID NO: 362, SEQ ID NO: 364, SEQ ID NO: 366, SEQ ID NO: 368, SEQ ID NO: 370, SEQ ID NO: 372, SEQ ID NO: 374, SEQ ID NO: 376, SEQ ID NO: 378, SEQ ID NO: 380, SEQ ID NO: 382, SEQ ID NO: 384, SEQ ID NO: 386, SEQ ID NO: 388, SEQ ID NO: 390, SEQ ID NO: 392, SEQ ID NO: 394, SEQ ID NO: 396, SEQ ID NO: 398, SEQ ID NO: 400, SEQ ID NO: 402, SEQ ID NO: 404, SEQ ID NO: 406, SEQ ID NO: 408, SEQ ID NO: 410, SEQ ID NO: 412, SEQ ID NO: 414, SEQ ID NO: 416, SEQ ID NO: 418, SEQ ID NO: 420, SEQ ID NO: 422, SEQ ID NO: 424, SEQ ID NO: 426, SEQ ID NO: 428, SEQ ID NO: 430, SEQ ID NO: 432, SEQ ID NO: 434 or SEQ ID NO: 440 or it's homolog is not necessarily required in order to bring about effective reduction in the expression. The advantage is, accordingly, that the method is tolerant with regard to sequence deviations as may be present as a consequence of genetic mutations, polymorphisms or evolutionary divergences. Thus, for example, using the dsRNA, which has been generated starting from a sequence of one of SEQ ID NO: 1, SEQ ID NO: 3, SEQ ID NO: 5, SEQ ID NO: 7, SEQ ID NO: 9, SEQ ID NO: 11, SEQ ID NO: 13, SEQ ID NO: 15, SEQ ID NO: 19, SEQ ID NO: 21, SEQ ID NO: 23, SEQ ID NO: 25, SEQ ID NO: 27, SEQ ID NO: 29, SEQ ID NO: 31; SEQ ID NO: 64, SEQ ID NO: 66, SEQ ID NO: 68, SEQ ID NO: 70, SEQ ID NO: 72, SEQ ID NO: 74, SEQ ID NO: 76, SEQ ID NO: 78, SEQ ID NO: 80, SEQ ID NO: 82, SEQ ID NO: 84, SEQ ID NO: 86, SEQ ID NO: 88, SEQ ID NO: 90, SEQ ID NO: 92, SEQ ID NO: 94, SEQ ID NO: 96, SEQ ID NO: 98, SEQ ID NO: 100, SEQ ID NO: 102, SEQ ID NO: 104, SEQ ID NO: 106, SEQ ID NO: 108, SEQ ID NO: 110, SEQ ID NO: 112, SEQ ID NO: 114, SEQ ID NO: 116, SEQ ID NO: 118, SEQ ID NO: 120, SEQ ID NO: 122, SEQ ID NO: 124, SEQ ID NO: 126, SEQ ID NO: 128, SEQ ID NO: 130, SEQ ID NO: 132, SEQ ID NO: 134, SEQ ID NO: 136, SEQ ID NO: 138, SEQ ID NO: 140, SEQ ID NO: , SEQ ID NO: 142, SEQ ID NO: 151, SEQ ID NO: 153, SEQ ID NO: 155, SEQ ID NO: 157, SEQ ID NO: 159, SEQ ID NO: 161, SEQ ID NO: 163, SEQ ID NO: 165, SEQ ID NO: 167, SEQ ID NO: 169, SEQ ID NO: 171, SEQ ID NO: 173, SEQ ID NO: 175, SEQ ID NO: 177, SEQ ID NO: 179, SEQ ID NO: 181, SEQ ID NO: 183, SEQ ID NO: 185, SEQ ID NO: 187, SEQ ID NO: 189, SEQ ID NO: 191, SEQ ID NO: 193, SEQ ID NO: 195, SEQ ID NO: 197, SEQ ID NO: 199, SEQ ID NO: 201, SEQ ID NO: 203, SEQ ID NO: 205, SEQ ID NO: 207, SEQ ID NO: 209, SEQ ID NO: 211, SEQ ID NO: 213, SEQ ID NO: 215, SEQ ID NO: 217, SEQ ID NO: 219, SEQ ID NO: 228, SEQ ID NO: 230, SEQ ID NO: 232, SEQ ID NO: 234, SEQ ID NO: 236, SEQ ID NO: 238, SEQ ID NO: 240, SEQ ID NO: 242, SEQ ID NO: 249, SEQ ID NO: 251, SEQ ID NO: 253, SEQ ID NO: 255, SEQ ID NO: 257, SEQ ID NO: 259, SEQ ID NO: 261, SEQ ID NO: 263, SEQ ID NO: 265, SEQ ID NO: 267, SEQ ID NO: 269, SEQ ID NO: 271, SEQ ID NO: 282, SEQ ID NO: 284, SEQ ID NO: 286, SEQ ID NO: 288, SEQ ID NO: 290, SEQ ID NO: 292, SEQ ID NO: 294, SEQ ID NO: 296, SEQ ID NO: 298, SEQ ID NO: 300, SEQ ID NO: 302, SEQ ID NO: 304, SEQ ID NO: 306, SEQ ID NO: 308, SEQ ID NO: 310, SEQ ID NO: 312, SEQ ID NO: 314, SEQ ID NO: 316, SEQ ID NO: 318, SEQ ID NO: 320, SEQ ID NO: 322, SEQ ID NO: 324, SEQ ID NO: 326, SEQ ID NO: 328, SEQ ID NO: 330, SEQ ID NO: 332, SEQ ID NO: 334, SEQ ID NO: 336, SEQ ID NO: 338, SEQ ID NO: 340, SEQ ID NO: 342, SEQ ID NO: 344, SEQ ID NO: 346, SEQ ID NO: 348, SEQ ID NO: 350, SEQ ID NO: 352, SEQ ID NO: 354, SEQ ID NO: 356, SEQ ID NO: 358, SEQ ID NO: 360, SEQ ID NO: 362, SEQ ID NO: 364, SEQ ID NO: 366, SEQ ID NO: 368, SEQ ID NO: 370, SEQ ID NO: 372, SEQ ID NO: 374, SEQ ID NO: 376, SEQ ID NO: 378, SEQ ID NO: 380, SEQ ID NO: 382, SEQ ID NO: 384, SEQ ID NO: 386, SEQ ID NO: 388, SEQ ID NO: 390, SEQ ID NO: 392, SEQ ID NO: 394, SEQ ID NO: 396, SEQ ID NO: 398, SEQ ID NO: 400, SEQ ID NO: 402, SEQ ID NO: 404, SEQ ID NO: 406, SEQ ID NO: 408, SEQ ID NO: 410, SEQ ID NO: 412, SEQ ID NO: 414, SEQ ID NO: 416, SEQ ID NO: 418, SEQ ID NO: 420, SEQ ID NO: 422, SEQ ID NO: 424, SEQ ID NO: 426, SEQ ID NO: 428, SEQ ID NO: 430, SEQ ID NO: 432, SEQ ID NO: 434 or SEQ ID NO: 440 or homologs thereof of the one organism, may be used to suppress the corresponding expression in another organism.

[0132] Due to the high degree of sequence homology between SEQ ID NO: 1, SEQ ID NO: 3, SEQ ID NO: 5, SEQ ID NO: 7, SEQ ID NO: 9, SEQ ID NO: 11, SEQ ID NO: 13, SEQ ID NO: 15, SEQ ID NO: 19, SEQ ID NO: 21, SEQ ID NO: 23, SEQ ID NO: 25, SEQ ID NO: 27, SEQ ID NO: 29, SEQ ID NO: 31; SEQ ID NO: 64, SEQ ID NO: 66, SEQ ID NO: 68, SEQ ID NO: 70, SEQ ID NO: 72, SEQ ID NO: 74, SEQ ID NO: 76, SEQ ID NO: 78, SEQ ID NO: 80, SEQ ID NO: 82, SEQ ID NO: 84, SEQ ID NO: 86, SEQ ID NO: 88, SEQ ID NO: 90, SEQ ID NO: 92, SEQ ID NO: 94, SEQ ID NO: 96, SEQ ID NO: 98, SEQ ID NO: 100, SEQ ID NO: 102, SEQ ID NO: 104, SEQ ID NO: 106, SEQ ID NO: 108, SEQ ID NO: 110, SEQ ID NO: 112, SEQ ID NO: 114, SEQ ID NO: 116, SEQ ID NO: 118, SEQ ID NO: 120, SEQ ID NO: 122, SEQ ID NO: 124, SEQ ID NO: 126, SEQ ID NO: 128, SEQ ID NO: 130, SEQ ID NO: 132, SEQ ID NO: 134, SEQ ID NO: 136, SEQ ID NO: 138, SEQ ID NO: 140, SEQ ID NO: , SEQ ID NO: 142, SEQ ID NO: 151, SEQ ID NO: 153, SEQ ID NO: 155, SEQ ID NO: 157, SEQ ID NO: 159, SEQ ID NO: 161, SEQ ID NO: 163, SEQ ID NO: 165, SEQ ID NO: 167, SEQ ID NO: 169, SEQ ID NO: 171, SEQ ID NO: 173, SEQ ID NO: 175, SEQ ID NO: 177, SEQ ID NO: 179, SEQ ID NO: 181, SEQ ID NO: 183, SEQ ID NO: 185, SEQ ID NO: 187, SEQ ID NO: 189, SEQ ID NO: 191, SEQ ID NO: 193, SEQ ID NO: 195, SEQ ID NO: 197, SEQ ID NO: 199, SEQ ID NO: 201, SEQ ID NO: 203, SEQ ID NO: 205, SEQ ID NO: 207, SEQ ID NO: 209, SEQ ID NO: 211, SEQ ID NO: 213, SEQ ID NO: 215, SEQ ID NO: 217, SEQ ID NO: 219, SEQ ID NO: 228, SEQ ID NO: 230, SEQ ID NO: 232, SEQ ID NO: 234, SEQ ID NO: 236, SEQ ID NO: 238, SEQ ID NO: 240, SEQ ID NO: 242, SEQ ID NO: 249, SEQ ID NO: 251, SEQ ID NO: 253, SEQ ID NO: 255, SEQ ID NO: 257, SEQ ID NO: 259, SEQ ID NO: 261, SEQ ID NO: 263, SEQ ID NO: 265, SEQ ID NO: 267, SEQ ID NO: 269, SEQ ID NO: 271, SEQ ID NO: 282, SEQ ID NO: 284, SEQ ID NO: 286, SEQ ID NO: 288, SEQ ID NO: 290, SEQ ID NO: 292, SEQ ID NO: 294, SEQ ID NO: 296, SEQ ID NO: 298, SEQ ID NO: 300, SEQ ID NO: 302, SEQ ID NO: 304, SEQ ID NO: 306, SEQ ID NO: 308, SEQ ID NO: 310, SEQ ID NO: 312, SEQ ID NO: 314, SEQ ID NO: 316, SEQ ID NO: 318, SEQ ID NO: 320, SEQ ID NO: 322, SEQ ID NO: 324, SEQ ID NO: 326, SEQ ID NO: 328, SEQ ID NO: 330, SEQ ID NO: 332, SEQ ID NO: 334, SEQ ID NO: 336, SEQ ID NO: 338, SEQ ID NO: 340, SEQ ID NO: 342, SEQ ID NO: 344, SEQ ID NO: 346, SEQ ID NO: 348, SEQ ID NO: 350, SEQ ID NO: 352, SEQ ID NO: 354, SEQ ID NO: 356, SEQ ID NO: 358, SEQ ID NO: 360, SEQ ID NO: 362, SEQ ID NO: 364, SEQ ID NO: 366, SEQ ID NO: 368, SEQ ID NO: 370, SEQ ID NO: 372, SEQ ID NO: 374, SEQ ID NO: 376, SEQ ID NO: 378, SEQ ID NO: 380, SEQ ID NO: 382, SEQ ID NO: 384, SEQ ID NO: 386, SEQ ID NO: 388, SEQ ID NO: 390, SEQ ID NO: 392, SEQ ID NO: 394, SEQ ID NO: 396, SEQ ID NO: 398, SEQ ID NO: 400, SEQ ID NO: 402, SEQ ID NO: 404, SEQ ID NO: 406, SEQ ID NO: 408, SEQ ID NO: 410, SEQ ID NO: 412, SEQ ID NO: 414, SEQ ID NO: 416, SEQ ID NO: 418, SEQ ID NO: 420, SEQ ID NO: 422, SEQ ID NO: 424, SEQ ID NO: 426, SEQ ID NO: 428, SEQ ID NO: 430, SEQ ID NO: 432, SEQ ID NO: 434 or SEQ ID NO: 440 from various organisms (e.g. plants), allows the conclusion that these proteins may be conserved to a high degree within, for example other plants, it is optionally possible so that the expression of a dsRNA derived from one of the disclosed sequences as shown in SEQ ID NO: 1, SEQ ID NO: 3, SEQ ID NO: 5, SEQ ID NO: 7, SEQ ID NO: 9, SEQ ID NO: 11, SEQ ID NO: 13, SEQ ID NO: 15, SEQ ID NO: 19, SEQ ID NO: 21, SEQ ID NO: 23, SEQ ID NO: 25, SEQ ID NO: 27, SEQ ID NO: 29, SEQ ID NO: 31; SEQ ID NO: 64, SEQ ID NO: 66, SEQ ID NO: 68, SEQ ID NO: 70, SEQ ID NO: 72, SEQ ID NO: 74, SEQ ID NO: 76, SEQ ID NO: 78, SEQ ID NO: 80, SEQ ID NO: 82, SEQ ID NO: 84, SEQ ID NO: 86, SEQ ID NO: 88, SEQ ID NO: 90, SEQ ID NO: 92, SEQ ID NO: 94, SEQ ID NO: 96, SEQ ID NO: 98, SEQ ID NO: 100, SEQ ID NO: 102, SEQ ID NO: 104, SEQ ID NO: 106, SEQ ID NO: 108, SEQ ID NO: 110, SEQ ID NO: 112, SEQ ID NO: 114, SEQ ID NO: 116, SEQ ID NO: 118, SEQ ID NO: 120, SEQ ID NO: 122, SEQ ID NO: 124, SEQ ID NO: 126, SEQ ID NO: 128, SEQ ID NO: 130, SEQ ID NO: 132, SEQ ID NO: 134, SEQ ID NO: 136, SEQ ID NO: 138, SEQ ID NO: 140, SEQ ID NO: , SEQ ID NO: 142, SEQ ID NO: 151, SEQ ID NO: 153, SEQ ID NO: 155, SEQ ID NO: 157, SEQ ID NO: 159, SEQ ID NO: 161, SEQ ID NO: 163, SEQ ID NO: 165, SEQ ID NO: 167, SEQ ID NO: 169, SEQ ID NO: 171, SEQ ID NO: 173, SEQ ID NO: 175, SEQ ID NO: 177, SEQ ID NO: 179, SEQ ID NO: 181, SEQ ID NO: 183, SEQ ID NO: 185, SEQ ID NO: 187, SEQ ID NO: 189, SEQ ID NO: 191, SEQ ID NO: 193, SEQ ID NO: 195, SEQ ID NO: 197, SEQ ID NO: 199, SEQ ID NO: 201, SEQ ID NO: 203, SEQ ID NO: 205, SEQ ID NO: 207, SEQ ID NO: 209, SEQ ID NO: 211, SEQ ID NO: 213, SEQ ID NO: 215, SEQ ID NO: 217, SEQ ID NO: 219, SEQ ID NO: 228, SEQ ID NO: 230, SEQ ID NO: 232, SEQ ID NO: 234, SEQ ID NO: 236, SEQ ID NO: 238, SEQ ID NO: 240, SEQ ID NO: 242, SEQ ID NO: 249, SEQ ID NO: 251, SEQ ID NO: 253, SEQ ID NO: 255, SEQ ID NO: 257, SEQ ID NO: 259, SEQ ID NO: 261, SEQ ID NO: 263, SEQ ID NO: 265, SEQ ID NO: 267, SEQ ID NO: 269, SEQ ID NO: 271, SEQ ID NO: 282, SEQ ID NO: 284, SEQ ID NO: 286, SEQ ID NO: 288, SEQ ID NO: 290, SEQ ID NO: 292, SEQ ID NO: 294, SEQ ID NO: 296, SEQ ID NO: 298, SEQ ID NO: 300, SEQ ID NO: 302, SEQ ID NO: 304, SEQ ID NO: 306, SEQ ID NO: 308, SEQ ID NO: 310, SEQ ID NO: 312, SEQ ID NO: 314, SEQ ID NO: 316, SEQ ID NO: 318, SEQ ID NO: 320, SEQ ID NO: 322, SEQ ID NO: 324, SEQ ID NO: 326, SEQ ID NO: 328, SEQ ID NO: 330, SEQ ID NO: 332, SEQ ID NO: 334, SEQ ID NO: 336, SEQ ID NO: 338, SEQ ID NO: 340, SEQ ID NO: 342, SEQ ID NO: 344, SEQ ID NO: 346, SEQ ID NO: 348, SEQ ID NO: 350, SEQ ID NO: 352, SEQ ID NO: 354, SEQ ID NO: 356, SEQ ID NO: 358, SEQ ID NO: 360, SEQ ID NO: 362, SEQ ID NO: 364, SEQ ID NO: 366, SEQ ID NO: 368, SEQ ID NO: 370, SEQ ID NO: 372, SEQ ID NO: 374, SEQ ID NO: 376, SEQ ID NO: 378, SEQ ID NO: 380, SEQ ID NO: 382, SEQ ID NO: 384, SEQ ID NO: 386, SEQ ID NO: 388, SEQ ID NO: 390, SEQ ID NO: 392, SEQ ID NO: 394, SEQ ID NO: 396, SEQ ID NO: 398, SEQ ID NO: 400, SEQ ID NO: 402, SEQ ID NO: 404, SEQ ID NO: 406, SEQ ID NO: 408, SEQ ID NO: 410, SEQ ID NO: 412, SEQ ID NO: 414, SEQ ID NO: 416, SEQ ID NO: 418, SEQ ID NO: 420, SEQ ID NO: 422, SEQ ID NO: 424, SEQ ID NO: 426, SEQ ID NO: 428, SEQ ID NO: 430, SEQ ID NO: 432, SEQ ID NO: 434 or SEQ ID NO: 440 or homologs thereof should also have an advantageous effect in other plant species.

[0133] The dsRNA can be synthesized either in vivo or in vitro. To this end, a DNA sequence encoding a dsRNA can be introduced into an expression cassette under the control of at least one genetic control element (such as, for example, promoter, enhancer, silencer, splice donor or splice acceptor or polyadenylation signal). Suitable advantageous constructs are described herein below. Polyadenylation is not required, nor do elements for initiating translation have to be present.

[0134] A dsRNA can be synthesized chemically or enzymatically. Cellular RNA polymerases or bacteriophage RNA polymerases (such as, for example T3, T7 or SP6 RNA polymerase) can be used for this purpose. Suitable methods for the in-vitro expression of RNA are described (WO 97/32016; U.S. Pat. No. 5,593,874; U.S. Pat. No. 5,698,425, U.S. Pat. No. 5,712,135, U.S. Pat. No. 5,789,214, U.S. Pat. No. 5,804,693). Prior to introduction into a cell, tissue or organism, a dsRNA which has been synthesized in vitro either chemically or enzymatically can be isolated to a higher or lesser degree from the reaction mixture, for example by extraction, precipitation, electrophoresis, chromatography or combinations of these methods. The dsRNA can be introduced directly into the cell or else be applied extracellularly (for example into the interstitial space). In one embodiment of the invention the RNAi method leads to only a partial loss of gene function and therefore enables the skilled worker to study a gene dose effect in the disered organism and to fine tune the process of the invention. In another preferred embodiment it leads to a total loss of function and therefore increases the production of the fine chemical. Furthermore it enables a person skilled in the art to study multiple functions of a gene.

[0135] Stable transformation of the plant with an expression construct, which brings about the expression of the dsRNA is preferred, however. Suitable methods are described herein below.

[0136] B) Introduction of an Antisense Nucleic Acid Sequence

[0137] Methods for suppressing a specific protein by preventing the accumulation of its mRNA by means of “antisense” technology can be used widely and has been described extensively, including for plants [Sheehy et al. (1988) Proc. Natl. Acad. Sci. USA 85: 8805-8809; US 4,801,34100; Mol J N et al. (1990) FEBS Lett 268(2): 427-430]. The antisense nucleic acid molecule hybridizes with, or binds to, the cellular mRNA and/or the genomic DNA encoding the target protein to be suppressed. This process suppresses the transcription and/or translation of the target protein. Hybridization can be brought about in the conventional manner via the formation of a stable duplex or, in the case of genomic DNA, by the antisense nucleic acid molecule binding to the duplex of the genomic DNA by specific interaction in the large groove of the DNA helix.

[0138] An “antisense” nucleic acid molecule comprises a nucleotide sequence, which is at least in part complementary to a “sense” nucleic acid molecule encoding a protein, e.g., complementary to the coding strand of a double-stranded cDNA molecule or complementary to an encoding mRNA sequence. Accordingly, an antisense nucleic acid molecule can bind via hydrogen bonds to a sense nucleic acid molecule. The antisense nucleic acid molecule can be complementary to an entire coding strand of a nucleic acid molecule conferring the expression of the polypeptide of the invention or to only a portion thereof. Accordingly, an antisense nucleic acid molecule can be antisense to a “coding region” of the coding strand of a nucleotide sequence of a nucleic acid molecule of the present invention. Advantageously the noncoding region is in the area of 50 bp, 100 bp, 200 bp or 300 bp, preferably 400 bp, 500 bp, 600 bp, 700 bp, 800 bp, 900 bp or 1000 bp up- and/or downstream from the coding region. The term “coding region” refers to the region of the nucleotide sequence comprising codons, which are translated into amino acid residues. Further, the antisense nucleic acid molecule is antisense to a “noncoding region” of the mRNA flanking the coding region of a nucleotide sequence. The term “noncoding region” refers to 5′ and 3′ sequences which flank the coding region that are not translated into a polypeptide, i.e., also referred to as 5′ and 3′ untranslated regions (5′-UTR or 3′-UTR).

[0139] Given the coding strand sequences encoding the polypeptide of the present invention, e.g. having above mentioned activity, e.g. the activity of a polypeptide with the biological activity of the protein of the invention as disclosed herein, antisense nucleic acid molecules of the invention can be designed according to the rules of Watson and Crick base pairing.

[0140] An antisense nucleic acid sequence which is suitable for reducing the activity of a protein can be deduced using the nucleic acid sequence encoding this protein, for example the nucleic acid sequence as shown in SEQ ID NO: 1, SEQ ID NO: 3, SEQ ID NO: 5, SEQ ID NO: 7, SEQ ID NO: 9, SEQ ID NO: 11, SEQ ID NO: 13, SEQ ID NO: 15, SEQ ID NO: 19, SEQ ID NO: 21, SEQ ID NO: 23, SEQ ID NO: 25, SEQ ID NO: 27, SEQ ID NO: 29, SEQ ID NO: 31; SEQ ID NO: 64, SEQ ID NO: 66, SEQ ID NO: 68, SEQ ID NO: 70, SEQ ID NO: 72, SEQ ID NO: 74, SEQ ID NO: 76, SEQ ID NO: 78, SEQ ID NO: 80, SEQ ID NO: 82, SEQ ID NO: 84, SEQ ID NO: 86, SEQ ID NO: 88, SEQ ID NO: 90, SEQ ID NO: 92, SEQ ID NO: 94, SEQ ID NO: 96, SEQ ID NO: 98, SEQ ID NO: 100, SEQ ID NO: 102, SEQ ID NO: 104, SEQ ID NO: 106, SEQ ID NO: 108, SEQ ID NO: 110, SEQ ID NO: 112, SEQ ID NO: 114, SEQ ID NO: 116, SEQ ID NO: 118, SEQ ID NO: 120, SEQ ID NO: 122, SEQ ID NO: 124, SEQ ID NO: 126, SEQ ID NO: 128, SEQ ID NO: 130, SEQ ID NO: 132, SEQ ID NO: 134, SEQ ID NO: 136, SEQ ID NO: 138, SEQ ID NO: 140, SEQ ID NO: , SEQ ID NO: 142, SEQ ID NO: 151, SEQ ID NO: 153, SEQ ID NO: 155, SEQ ID NO: 157, SEQ ID NO: 159, SEQ ID NO: 161, SEQ ID NO: 163, SEQ ID NO: 165, SEQ ID NO: 167, SEQ ID NO: 169, SEQ ID NO: 171, SEQ ID NO: 173, SEQ ID NO: 175, SEQ ID NO: 177, SEQ ID NO: 179, SEQ ID NO: 181, SEQ ID NO: 183, SEQ ID NO: 185, SEQ ID NO: 187, SEQ ID NO: 189, SEQ ID NO: 191, SEQ ID NO: 193, SEQ ID NO: 195, SEQ ID NO: 197, SEQ ID NO: 199, SEQ ID NO: 201, SEQ ID NO: 203, SEQ ID NO: 205, SEQ ID NO: 207, SEQ ID NO: 209, SEQ ID NO: 211, SEQ ID NO: 213, SEQ ID NO: 215, SEQ ID NO: 217, SEQ ID NO: 219, SEQ ID NO: 228, SEQ ID NO: 230, SEQ ID NO: 232, SEQ ID NO: 234, SEQ ID NO: 236, SEQ ID NO: 238, SEQ ID NO: 240, SEQ ID NO: 242, SEQ ID NO: 249, SEQ ID NO: 251, SEQ ID NO: 253, SEQ ID NO: 255, SEQ ID NO: 257, SEQ ID NO: 259, SEQ ID NO: 261, SEQ ID NO: 263, SEQ ID NO: 265, SEQ ID NO: 267, SEQ ID NO: 269, SEQ ID NO: 271, SEQ ID NO: 282, SEQ ID NO: 284, SEQ ID NO: 286, SEQ ID NO: 288, SEQ ID NO: 290, SEQ ID NO: 292, SEQ ID NO: 294, SEQ ID NO: 296, SEQ ID NO: 298, SEQ ID NO: 300, SEQ ID NO: 302, SEQ ID NO: 304, SEQ ID NO: 306, SEQ ID NO: 308, SEQ ID NO: 310, SEQ ID NO: 312, SEQ ID NO: 314, SEQ ID NO: 316, SEQ ID NO: 318, SEQ ID NO: 320, SEQ ID NO: 322, SEQ ID NO: 324, SEQ ID NO: 326, SEQ ID NO: 328, SEQ ID NO: 330, SEQ ID NO: 332, SEQ ID NO: 334, SEQ ID NO: 336, SEQ ID NO: 338, SEQ ID NO: 340, SEQ ID NO: 342, SEQ ID NO: 344, SEQ ID NO: 346, SEQ ID NO: 348, SEQ ID NO: 350, SEQ ID NO: 352, SEQ ID NO: 354, SEQ ID NO: 356, SEQ ID NO: 358, SEQ ID NO: 360, SEQ ID NO: 362, SEQ ID NO: 364, SEQ ID NO: 366, SEQ ID NO: 368, SEQ ID NO: 370, SEQ ID NO: 372, SEQ ID NO: 374, SEQ ID NO: 376, SEQ ID NO: 378, SEQ ID NO: 380, SEQ ID NO: 382, SEQ ID NO: 384, SEQ ID NO: 386, SEQ ID NO: 388, SEQ ID NO: 390, SEQ ID NO: 392, SEQ ID NO: 394, SEQ ID NO: 396, SEQ ID NO: 398, SEQ ID NO: 400, SEQ ID NO: 402, SEQ ID NO: 404, SEQ ID NO: 406, SEQ ID NO: 408, SEQ ID NO: 410, SEQ ID NO: 412, SEQ ID NO: 414, SEQ ID NO: 416, SEQ ID NO: 418, SEQ ID NO: 420, SEQ ID NO: 422, SEQ ID NO: 424, SEQ ID NO: 426, SEQ ID NO: 428, SEQ ID NO: 430, SEQ ID NO: 432, SEQ ID NO: 434 or SEQ ID NO: 440 (or homologs, analogs, paralogs, orthologs thereof), by applying the base-pair rules of Watson and Crick. The antisense nucleic acid sequence can be complementary to all of the transcribed mRNA of the protein; it may be limited to the coding region, or it may only consist of one oligonucleotide, which is complementary to part of the coding or noncoding sequence of the mRNA. Thus, for example, the oligonucleotide can be complementary to the nucleic acid region, which encompasses the translation start for the protein. Antisense nucleic acid sequences may have an advantageous length of, for example, 5, 10, 15, 20, 25, 30, 35, 40, 45 or 50 nucleotides but they may also be longer and encompass at least 100, 200, 500, 1000, 2000 or 5000 nucleotides. A particular preferred length is between 15 and 30 nucleotides such as 15, 20, 25 or 30 nucleotides. Antisense nucleic acid sequences can be expressed recombinantly or synthesized chemically or enzymatically using methods known to the skilled worker. For example, an anti-sense nucleic acid molecule (e.g., an antisense oligonucleotide) can be chemically synthesized using naturally occurring nucleotides or variously modified nucleotides designed to increase the biological stability of the molecules or to increase the physical stability of the duplex formed between the antisense and sense nucleic acids, e.g., phosphorothioate derivatives and acridine substituted nucleotides can be used. Examples of substances which can be used are phosphorothioate derivatives and acridine-substituted nucleotides such as 5-fluorouracil, 5-bromouracil, 5-chlorouracil, 5-iodouracil, hypoxanthin, xanthin, 4-acetylcytosine, 5-(carboxyhydroxymethyl)uracil, 5-carboxymethylaminomethyl-2-thiouridine, 5-carboxymethylaminomethyluracil, dihydrouracil, β-D-galactosylqueosine, inosine, N6-isopentenyladenine, 1-methylguanine, 1-methylinosine, 2,2-dimethylguanine, 2-methyladenine, 2-methylguanine, 3-methylcytosine, 5-methylcytosine, N6-adenine, 7-methylguanine, 5-methylaminomethyluracil, 5-methoxyaminomethyl-2-thiouracil, β-D-mannosylqueosine, 5′-methoxycarboxymethyluracil, 5-methoxyuracil, 2-methylthio-N6-isopentenyladenine, uracil-5-oxyacetic acid, pseudouracil, queosine, 2-thiocytosine, 5-methyl-2-thiouracil, 2-thiouracil, 4-thiouracil, 5-methyluracil, methyl uracil-5-oxyacetate, uracil-5-oxyacetic acid, 5-methyl-2-thiouracil, 3-(3-amino-3-N-2-carboxypropyl)uracil and 2,6-diaminopurine. Alternatively, the antisense nucleic acid can be produced biologically using an expression vector into which a nucleic acid molecule has been subcloned in an anti-sense orientation (i.e., RNA transcribed from the inserted nucleic acid molecule will be of an antisense orientation to a target nucleic acid molecule of interest, described further in the following subsection).

[0141] In a further preferred embodiment, the expression of a protein encoded by one of SEQ ID NO: 2, SEQ ID NO: 4, SEQ ID NO: 6, SEQ ID NO: 8, SEQ ID NO: 10, SEQ ID NO: 12, SEQ ID NO: 14, SEQ ID NO: 16, SEQ ID NO: 20, SEQ ID NO: 22, SEQ ID NO: 24, SEQ ID NO: 26, SEQ ID NO: 28, SEQ ID NO. 30, SEQ ID NO: 32; SEQ ID NO: 65, SEQ ID NO: 67, SEQ ID NO: 69, SEQ ID NO: 71, SEQ ID NO: 73, SEQ ID NO: 75, SEQ ID NO: 77, SEQ ID NO: 79, SEQ ID NO: 81, SEQ ID NO: 83, SEQ ID NO: 85, SEQ ID NO: 87, SEQ ID NO: 89, SEQ ID NO: 91, SEQ ID NO: 93, SEQ ID NO: 95, SEQ ID NO: 97, SEQ ID NO: 99, SEQ ID NO: 101, SEQ ID NO: 103, SEQ ID NO: 105, SEQ ID NO: 107, SEQ ID NO: 109, SEQ ID NO: 111, SEQ ID NO: 113, SEQ ID NO: 115, SEQ ID NO: 117, SEQ ID NO: 119, SEQ ID NO: 121, SEQ ID NO: 123, SEQ ID NO: 125, SEQ ID NO: 127, SEQ ID NO: 129, SEQ ID NO: 131, SEQ ID NO: 133, SEQ ID NO: 135, SEQ ID NO: 137, SEQ ID NO: 139, SEQ ID NO: 141, SEQ ID NO: 143, SEQ ID NO: 152, SEQ ID NO: 154, SEQ ID NO: 156, SEQ ID NO: 158, SEQ ID NO: 160, SEQ ID NO: 162, SEQ ID NO: 164, SEQ ID NO: 166, SEQ ID NO: 168, SEQ ID NO: 170, SEQ ID NO: 172, SEQ ID NO: 174, SEQ ID NO: 176, SEQ ID NO: 178, SEQ ID NO: 180, SEQ ID NO: 182, SEQ ID NO: 184, SEQ ID NO: 186, SEQ ID NO: 188, SEQ ID NO: 190, SEQ ID NO: 192, SEQ ID NO: 194, SEQ ID NO: 196, SEQ ID NO: 198, SEQ ID NO: 200, SEQ ID NO: 202, SEQ ID NO: 204, SEQ ID NO: 206, SEQ ID NO: 208, SEQ ID NO: 210, SEQ ID NO: 212, SEQ ID NO: 214, SEQ ID NO: 216, SEQ ID NO: 218, SEQ ID NO: 220, SEQ ID NO: 229, SEQ ID NO:231, SEQ ID NO:233, SEQ ID NO: 235, SEQ ID NO: 237, SEQ ID NO: 239, SEQ ID NO: 241, SEQ ID NO: 243, SEQ ID NO: 250, SEQ ID NO: 252, SEQ ID NO: 254, SEQ ID NO: 256, SEQ ID NO: 258, SEQ ID NO: 260, SEQ ID NO: 262, SEQ ID NO: 264, SEQ ID NO: 266, SEQ ID NO: 268, SEQ ID NO: 270, SEQ ID NO: 272, SEQ ID NO: 283, SEQ ID NO: 285, SEQ ID NO: 287, SEQ ID NO: 289, SEQ ID NO: 291, SEQ ID NO: 293, SEQ ID NO: 295, SEQ ID NO: 297, SEQ ID NO: 299, SEQ ID NO: 301, SEQ ID NO: 303, SEQ ID NO: 305, SEQ ID NO: 307, SEQ ID NO: 309, SEQ ID NO: 311, SEQ ID NO: 313, SEQ ID NO: 315, SEQ ID NO: 317, SEQ ID NO: 319, SEQ ID NO: 321, SEQ ID NO: 323, SEQ ID NO: 325, SEQ ID NO: 327, SEQ ID NO: 329, SEQ ID NO: 331, SEQ ID NO: 333, SEQ ID NO: 335, SEQ ID NO: 337, SEQ ID NO: 339, SEQ ID NO: 341, SEQ ID NO: 343, SEQ ID NO: 345, SEQ ID NO: 347, SEQ ID NO: 349, SEQ ID NO: 351, SEQ ID NO: 353, SEQ ID NO: 355, SEQ ID NO: 357, SEQ ID NO: 359, SEQ ID NO: 361, SEQ ID NO: 363, SEQ ID NO: 365, SEQ ID NO: 367, SEQ ID NO: 369, SEQ ID NO: 371, SEQ ID NO: 373, SEQ ID NO: 375, SEQ ID NO: 377, SEQ ID NO: 379, SEQ ID NO: 381, SEQ ID NO: 383, SEQ ID NO: 385, SEQ ID NO: 387, SEQ ID NO: 389, SEQ ID NO: 391, SEQ ID NO: 393, SEQ ID NO: 395, SEQ ID NO: 397, SEQ ID NO: 399, SEQ ID NO: 401, SEQ ID NO: 403, SEQ ID NO: 405, SEQ ID NO: 407, SEQ ID NO: 409, SEQ ID NO: 411, SEQ ID NO: 413, SEQ ID NO: 415, SEQ ID NO: 417, SEQ ID NO: 419, SEQ ID NO: 421, SEQ ID NO: 423, SEQ ID NO: 425, SEQ ID NO: 427, SEQ ID NO: 429, SEQ ID NO: 431, SEQ ID NO: 433, SEQ ID NO: 435 or SEQ ID NO: 441 or homologs, analogs, paralogs, orthologs thereof can be inhibited by nucleotide sequences which are complementary to the regulatory region of a gene (for example a promoter and/or enhancer) and which may form triplex structures with the DNA double helix in this region so that the transcription of the gene is reduced. Such methods have been described (Helene C (1991) Anticancer Drug Res. 6(6): 569-84; Helene C et al. (1992) Ann. NY Acad. Sci. 660: 27-36; Maher L J (1992) Bioassays 14(12): 807-815).

[0142] In a further embodiment, the antisense nucleic acid molecule can be an α-anomeric nucleic acid. Such α-anomeric nucleic acid molecules form specific double-stranded hybrids with complementary RNA in which—as opposed to the conventional β-nucleic acids—the two strands run in parallel with one another (Gautier C et al. (1987) Nucleic Acids Res. 15: 6625-6641). Furthermore, the antisense nucleic acid molecule can also comprise 2′-O-methylribonucleotides [Inoue et al. (1987) Nucleic Acids Res. 15: 6131-6148] or chimeric RNA-DNA analogs [Inoue et al. (1987) FEBS Lett 215: 327-330].

[0143] The antisense nucleic acid molecules of the invention are typically administered to a cell or generated in situ such that they hybridize with or bind to cellular mRNA and/or genomic DNA encoding a polypeptide having the biological activity of protein of the invention thereby inhibit expression of the protein, e.g., by inhibiting transcription and/or translation and leading to the aforementioned fine chemical increasing activity.

[0144] The antisense molecule of the present invention comprises also a nucleic acid molecule comprising a nucleotide sequences complementary to the regulatory region of an nucleotide sequence encoding the natural occurring polypeptide of the invention, e.g. the polypeptide sequences shown in the sequence listing, or identified according to the methods described herein, e.g., its promoter and/or enhancers, e.g. to form triple helical structures that prevent transcription of the gene in target cells. See generally, Helene, C. (1991) Anticancer Drug Des. 6(6):569-84; Helene, C. et al. (1992) Ann. N.Y. Acad. Sci. 660:27-36; and Maher, L. J. (1992) Bioassays 14(12):807-15.

[0145] C) Introduction of an Antisense Nucleic Acid Sequence Combined with a Ribozyme

[0146] It is advantageous to combine the above-described antisense strategy with a ribozyme method. Catalytic RNA molecules or ribozymes can be adapted to any target RNA and cleave the phosphodiester backbone at specific positions, thus functionally deactivating the target RNA (Tanner N K (1999) FEMS Microbiol. Rev. 23(3): 257-275). The ribozyme per se is not modified thereby, but is capable of cleaving further target RNA molecules in an analogous manner, thus acquiring the properties of an enzyme. The incorporation of ribozyme sequences into “antisense” RNAs imparts this enzyme-like RNA-cleaving property to precisely these “antisense” RNAs and thus increases their efficiency when inactivating the target RNA. The preparation and the use of suitable ribozyme “antisense” RNA molecules is described, for example, by Haseloff et al. (1988) Nature 33410: 585-591.

[0147] Further the antisense nucleic acid molecule of the invention can be also a ribozyme. Ribozymes are catalytic RNA molecules with ribonuclease activity, which are capable of cleaving a single-stranded nucleic acid, such as an mRNA, to which they have a complementary region. In this manner, ribozymes [for example “Hammerhead” ribozymes; Haselhoff and Gerlach (1988) Nature 33410: 585-591] can be used to catalytically cleave the mRNA of an enzyme to be suppressed and to prevent translation. The ribozyme technology can increase the efficacy of an anti-sense strategy. Methods for expressing ribozymes for reducing specific proteins are described in (EP 0 291 533, EP 0 321 201, EP 0 360 257). Ribozyme expression has also been described for plant cells (Steinecke P et al. (1992) EMBO J 11(4): 1525-1530; de Feyter R et al. (1996) Mol. Gen. Genet. 250(3): 329-338). Suitable target sequences and ribozymes can be identified for example as described by Steinecke P, Ribozymes, Methods in Cell Biology 50, Galbraith et al. eds, Academic Press, Inc. (1995), pp. 449-460 by calculating the secondary structures of ribozyme RNA and target RNA and by their interaction [Bayley C C et al. (1992) Plant Mol. Biol. 18(2): 353-361; Lloyd A M and Davis R W et al. (1994) Mol. Gen. Genet. 242(6): 653-657]. For example, derivatives of the tetrahymena L-19 IVS RNA, which have complementary regions to the mRNA of the protein to be suppressed can be constructed (see also U.S. Pat. No. 4,987,071 and U.S. Pat. No. 5,116,742). As an alternative, such ribozymes can also be identified from a library of a variety of ribozymes via a selection process (Bartel D and Szostak J W (1993) Science 261: 1411-1418).

[0148] D) Introduction of a (Sense) Nucleic Acid Sequence for Inducing Cosuppression

[0149] The expression of a nucleic acid sequence in sense orientation can lead to cosuppression of the corresponding homologous, endogenous genes. The expression of sense RNA with homology to an endogenous gene can reduce or indeed eliminate the expression of the endogenous gene, in a similar manner as has been described for the following antisense approaches: Jorgensen et al. [(1996) Plant Mol. Biol. 31(5): 957-973], Goring et al. [(1991) Proc. Natl. Acad. Sci. USA 88: 1770-1774], Smith et al. [(1990) Mol. Gen. Genet. 224: 447-481], Napoli et al. [(1990) Plant Cell 2: 279-289] or Van der Krol et al. [(1990) Plant Cell 2: 291-99]. In this context, the construct introduced may represent the homologous gene to be reduced either in full or only in part. The application of this technique to plants has been described for example by Napoli et al. [(1990) The Plant Cell 2: 279-289 and in US 5,03410,323]. Furthermore the above described cosuppression strategy can advantageously be combined with the RNAi method as described by Brummell et al., 2003, Plant J. 33, pp 793-800.

[0150] E) Introduction of Nucleic Acid Sequences Encoding a Dominant-Negative Protein

[0151] The function or activity of a protein can efficiently also be reduced by expressing a dominant-negative variant of said protein. The skilled worker is familiar with methods for reducing the function or activity of a protein by means of coexpression of its dominant-negative form [Lagna G and Hemmati-Brivanlou A (1998) Current Topics in Developmental Biology 36: 75-98; Perlmutter R M and Alberola-IIa J (1996) Current Opinion in Immunology 8(2): 285-90; Sheppard D (1994) American Journal of Respiratory Cell & Molecular Biology 11(1): 1-6; Herskowitz I (1987) Nature 329 (6136): 219-22].

[0152] A dominant-negative variant can be realized for example by changing of an amino acid in the proteins encoded by one of SEQ ID NO: 2, SEQ ID NO: 4, SEQ ID NO: 6, SEQ ID NO: 8, SEQ ID NO: 10, SEQ ID NO: 12, SEQ ID NO: 14, SEQ ID NO: 16, SEQ ID NO: 20, SEQ ID NO: 22, SEQ ID NO: 24, SEQ ID NO: 26, SEQ ID NO: 28, SEQ ID NO. 30, SEQ ID NO: 32; SEQ ID NO: 65, SEQ ID NO: 67, SEQ ID NO: 69, SEQ ID NO: 71, SEQ ID NO: 73, SEQ ID NO: 75, SEQ ID NO: 77, SEQ ID NO: 79, SEQ ID NO: 81, SEQ ID NO: 83, SEQ ID NO: 85, SEQ ID NO: 87, SEQ ID NO: 89, SEQ ID NO: 91, SEQ ID NO: 93, SEQ ID NO: 95, SEQ ID NO: 97, SEQ ID NO: 99, SEQ ID NO: 101, SEQ ID NO: 103, SEQ ID NO: 105, SEQ ID NO: 107, SEQ ID NO: 109, SEQ ID NO: 111, SEQ ID NO: 113, SEQ ID NO: 115, SEQ ID NO: 117, SEQ ID NO: 119, SEQ ID NO: 121, SEQ ID NO: 123, SEQ ID NO: 125, SEQ ID NO: 127, SEQ ID NO: 129, SEQ ID NO: 131, SEQ ID NO: 133, SEQ ID NO: 135, SEQ ID NO: 137, SEQ ID NO: 139, SEQ ID NO: 141, SEQ ID NO: 143, SEQ ID NO: 152, SEQ ID NO: 154, SEQ ID NO: 156, SEQ ID NO: 158, SEQ ID NO: 160, SEQ ID NO: 162, SEQ ID NO: 164, SEQ ID NO: 166, SEQ ID NO: 168, SEQ ID NO: 170, SEQ ID NO: 172, SEQ ID NO: 174, SEQ ID NO: 176, SEQ ID NO: 178, SEQ ID NO: 180, SEQ ID NO: 182, SEQ ID NO: 184, SEQ ID NO: 186, SEQ ID NO: 188, SEQ ID NO: 190, SEQ ID NO: 192, SEQ ID NO: 194, SEQ ID NO: 196, SEQ ID NO: 198, SEQ ID NO: 200, SEQ ID NO: 202, SEQ ID NO: 204, SEQ ID NO: 206, SEQ ID NO: 208, SEQ ID NO: 210, SEQ ID NO: 212, SEQ ID NO: 214, SEQ ID NO: 216, SEQ ID NO: 218, SEQ ID NO: 220, SEQ ID NO: 229, SEQ ID NO:231, SEQ ID NO:233, SEQ ID NO: 235, SEQ ID NO: 237, SEQ ID NO: 239, SEQ ID NO: 241, SEQ ID NO: 243, SEQ ID NO: 250, SEQ ID NO: 252, SEQ ID NO: 254, SEQ ID NO: 256, SEQ ID NO: 258, SEQ ID NO: 260, SEQ ID NO: 262, SEQ ID NO: 264, SEQ ID NO: 266, SEQ ID NO: 268, SEQ ID NO: 270, SEQ ID NO: 272, SEQ ID NO: 283, SEQ ID NO: 285, SEQ ID NO: 287, SEQ ID NO: 289, SEQ ID NO: 291, SEQ ID NO: 293, SEQ ID NO: 295, SEQ ID NO: 297, SEQ ID NO: 299, SEQ ID NO: 301, SEQ ID NO: 303, SEQ ID NO: 305, SEQ ID NO: 307, SEQ ID NO: 309, SEQ ID NO: 311, SEQ ID NO: 313, SEQ ID NO: 315, SEQ ID NO: 317, SEQ ID NO: 319, SEQ ID NO: 321, SEQ ID NO: 323, SEQ ID NO: 325, SEQ ID NO: 327, SEQ ID NO: 329, SEQ ID NO: 331, SEQ ID NO: 333, SEQ ID NO: 335, SEQ ID NO: 337, SEQ ID NO: 339, SEQ ID NO: 341, SEQ ID NO: 343, SEQ ID NO: 345, SEQ ID NO: 347, SEQ ID NO: 349, SEQ ID NO: 351, SEQ ID NO: 353, SEQ ID NO: 355, SEQ ID NO: 357, SEQ ID NO: 359, SEQ ID NO: 361, SEQ ID NO: 363, SEQ ID NO: 365, SEQ ID NO: 367, SEQ ID NO: 369, SEQ ID NO: 371, SEQ ID NO: 373, SEQ ID NO: 375, SEQ ID NO: 377, SEQ ID NO: 379, SEQ ID NO: 381, SEQ ID NO: 393, SEQ ID NO: 385, SEQ ID NO: 387, SEQ ID NO: 389, SEQ ID NO: 391, SEQ ID NO: 393, SEQ ID NO: 395, SEQ ID NO: 397, SEQ ID NO: 399, SEQ ID NO: 401, SEQ ID NO: 403, SEQ ID NO: 405, SEQ ID NO: 407, SEQ ID NO: 409, SEQ ID NO: 411, SEQ ID NO: 413, SEQ ID NO: 415, SEQ ID NO: 417, SEQ ID NO: 419, SEQ ID NO: 421, SEQ ID NO: 423, SEQ ID NO: 425, SEQ ID NO: 427, SEQ ID NO: 429, SEQ ID NO: 431, SEQ ID NO: 433, SEQ ID NO: 435 or SEQ ID NO: 441 or homologs thereof. This change can be determined for example by computer-aided comparison (“alignment”). These mutations for achieving a dominant-negative variant are preferably carried out at the level of the nucleic acid sequences. A corresponding mutation can be performed for example by PCR-mediated in-vitro mutagenesis using suitable oligonucleotide primers by means of which the desired mutation is introduced. To this end, methods are used with which the skilled worker is familiar. For example, the “LA PCR in vitro Mutagenesis Kit” (Takara Shuzo, Kyoto) can be used for this purpose. It is also possible and known to those skilled in the art that deleting or changing of functional do mains, e.g. TF or other signaling components which can bind but not activate may achieve the reduction of protein activity.

[0153] F) Introduction of DNA- or Protein-Binding Factors Against Genes, RNAs or Proteins

[0154] A reduction in the expression of a gene encoded by one of SEQ ID NO: 1, SEQ ID NO: 3, SEQ ID NO: 5, SEQ ID NO: 7, SEQ ID NO: 9, SEQ ID NO: 11, SEQ ID NO: 13, SEQ ID NO: 15, SEQ ID NO: 19, SEQ ID NO: 21, SEQ ID NO: 23, SEQ ID NO: 25, SEQ ID NO: 27, SEQ ID NO: 29, SEQ ID NO: 31; SEQ ID NO: 64, SEQ ID NO: 66, SEQ ID NO: 68, SEQ ID NO: 70, SEQ ID NO: 72, SEQ ID NO: 74, SEQ ID NO: 76, SEQ ID NO: 78, SEQ ID NO: 80, SEQ ID NO: 82, SEQ ID NO: 84, SEQ ID NO: 86, SEQ ID NO: 88, SEQ ID NO: 90, SEQ ID NO: 92, SEQ ID NO: 94, SEQ ID NO: 96, SEQ ID NO: 98, SEQ ID NO: 100, SEQ ID NO: 102, SEQ ID NO: 104, SEQ ID NO: 106, SEQ ID NO: 108, SEQ ID NO: 110, SEQ ID NO: 112, SEQ ID NO: 114, SEQ ID NO: 116, SEQ ID NO: 118, SEQ ID NO: 120, SEQ ID NO: 122, SEQ ID NO: 124, SEQ ID NO: 126, SEQ ID NO: 128, SEQ ID NO: 130, SEQ ID NO: 132, SEQ ID NO: 134, SEQ ID NO: 136, SEQ ID NO: 138, SEQ ID NO: 140, SEQ ID NO: , SEQ ID NO: 142, SEQ ID NO: 151, SEQ ID NO: 153, SEQ ID NO: 155, SEQ ID NO: 157, SEQ ID NO: 159, SEQ ID NO: 161, SEQ ID NO: 163, SEQ ID NO: 165, SEQ ID NO: 167, SEQ ID NO: 169, SEQ ID NO: 171, SEQ ID NO: 173, SEQ ID NO: 175, SEQ ID NO: 177, SEQ ID NO: 179, SEQ ID NO: 181, SEQ ID NO: 183, SEQ ID NO: 185, SEQ ID NO: 187, SEQ ID NO: 189, SEQ ID NO: 191, SEQ ID NO: 193, SEQ ID NO: 195, SEQ ID NO: 197, SEQ ID NO: 199, SEQ ID NO: 201, SEQ ID NO: 203, SEQ ID NO: 205, SEQ ID NO: 207, SEQ ID NO: 209, SEQ ID NO: 211, SEQ ID NO: 213, SEQ ID NO: 215, SEQ ID NO: 217, SEQ ID NO: 219, SEQ ID NO: 228, SEQ ID NO: 230, SEQ ID NO: 232, SEQ ID NO: 234, SEQ ID NO: 236, SEQ ID NO: 238, SEQ ID NO: 240, SEQ ID NO: 242, SEQ ID NO: 249, SEQ ID NO: 251, SEQ ID NO: 253, SEQ ID NO: 255, SEQ ID NO: 257, SEQ ID NO: 259, SEQ ID NO: 261, SEQ ID NO: 263, SEQ ID NO: 265, SEQ ID NO: 267, SEQ ID NO: 269, SEQ ID NO: 271, SEQ ID NO: 282, SEQ ID NO: 284, SEQ ID NO: 286, SEQ ID NO: 288, SEQ ID NO: 290, SEQ ID NO: 292, SEQ ID NO: 294, SEQ ID NO: 296, SEQ ID NO: 298, SEQ ID NO: 300, SEQ ID NO: 302, SEQ ID NO: 304, SEQ ID NO: 306, SEQ ID NO: 308, SEQ ID NO: 310, SEQ ID NO: 312, SEQ ID NO: 314, SEQ ID NO: 316, SEQ ID NO: 318, SEQ ID NO: 320, SEQ ID NO: 322, SEQ ID NO: 324, SEQ ID NO: 326, SEQ ID NO: 328, SEQ ID NO: 330, SEQ ID NO: 332, SEQ ID NO: 334, SEQ ID NO: 336, SEQ ID NO: 338, SEQ ID NO: 340, SEQ ID NO: 342, SEQ ID NO: 344, SEQ ID NO: 346, SEQ ID NO: 348, SEQ ID NO: 350, SEQ ID NO: 352, SEQ ID NO: 354, SEQ ID NO: 356, SEQ ID NO: 358, SEQ ID NO: 360, SEQ ID NO: 362, SEQ ID NO: 364, SEQ ID NO: 366, SEQ ID NO: 368, SEQ ID NO: 370, SEQ ID NO: 372, SEQ ID NO: 374, SEQ ID NO: 376, SEQ ID NO: 378, SEQ ID NO: 380, SEQ ID NO: 382, SEQ ID NO: 384, SEQ ID NO: 386, SEQ ID NO: 388, SEQ ID NO: 390, SEQ ID NO: 392, SEQ ID NO: 394, SEQ ID NO: 396, SEQ ID NO: 398, SEQ ID NO: 400, SEQ ID NO: 402, SEQ ID NO: 404, SEQ ID NO: 406, SEQ ID NO: 408, SEQ ID NO: 410, SEQ ID NO: 412, SEQ ID NO: 414, SEQ ID NO: 416, SEQ ID NO: 418, SEQ ID NO: 420, SEQ ID NO: 422, SEQ ID NO: 424, SEQ ID NO: 426, SEQ ID NO: 428, SEQ ID NO: 430, SEQ ID NO: 432, SEQ ID NO: 434 or SEQ ID NO: 440 or homologs thereof according to the invention can also be achieved with specific DNA-binding factors, for example factors of the zinc finger transcription factor type. These factors attach to the genomic sequence of the endogenous target gene, preferably in the regulatory regions, and bring about repression of the endogenous gene. The use of such a method makes possible the reduction in the expression of an endogenous gene without it being necessary to recombinantly manipulate the sequence of the latter. Such methods for the preparation of relevant factors are described in Dreier B et al. [(2001) J. Biol. Chem. 276(31): 29466-78 and (2000) J. Mol. Biol. 303(4): 489-502], Beerli R R et al. [(1998) Proc. Natl. Acad. Sci. USA 95(25): 14628-14633; (2000) Proc. Natl. Acad. Sci. USA 97(4): 1495-1500 and (2000) J. Biol. Chem. 275(42): 32617-32627)], Segal D J and Barbas C F [3rd (2000) Curr. Opin. Chem. Biol. 4(1): 3410-39], Kang JS and Kim JS [(2000) J. Biol. Chem. 275(12): 8742-8748], Kim J S et al. [(1997) Proc. Natl. Acad. Sci. USA 94(8): 3616-3620], Klug A [(1999) J. Mol. Biol. 293(2): 215-218], Tsai S Y et al. [(1998) Adv. Drug Deliv. Rev. 30(1-3): 23-31], Mapp A K et al. [(2000) Proc. Natl. Acad. Sci. USA 97(8): 3930-3935], Sharrocks A D et al. [(1997) Int. J. Biochem. Cell Biol. 29(12): 1371-1387] and Zhang L et al. [(2000) J. Biol. Chem. 275(43): 33850-33860]. Examples for the application of this technology in plants have been described in WO 01/52620, Ordiz M I et al., (Proc. Natl. Acad. Sci. USA, Vol. 99, Issue 20, 13290-13295, 2002) or Guan et al., (Proc. Natl. Acad. Sci. USA, Vol. 99, Issue 20, 13296-13301, 2002)

[0155] These factors can be selected using any portion of a gene. This segment is preferably located in the promoter region. For the purposes of gene suppression, however, it may also be located in the region of the coding exons or introns. The skilled worker can obtain the relevant segments from Genbank by database search or starting from a cDNA whose gene is not present in Genbank by screening a genomic library for corresponding genomic clones.

[0156] It is also possible to first identify sequences in a target crop, which are encoded by one of SEQ ID NO: 1, SEQ ID NO: 3, SEQ ID NO: 5, SEQ ID NO: 7, SEQ ID NO: 9, SEQ ID NO: 11, SEQ ID NO: 13, SEQ ID NO: 15, SEQ ID NO: 19, SEQ ID NO: 21, SEQ ID NO: 23, SEQ ID NO: 25, SEQ ID NO: 27, SEQ ID NO: 29, SEQ ID NO: 31; SEQ ID NO: 64, SEQ ID NO: 66, SEQ ID NO: 68, SEQ ID NO: 70, SEQ ID NO: 72, SEQ ID NO: 74, SEQ ID NO: 76, SEQ ID NO: 78, SEQ ID NO: 80, SEQ ID NO: 82, SEQ ID NO: 84, SEQ ID NO: 86, SEQ ID NO: 88, SEQ ID NO: 90, SEQ ID NO: 92, SEQ ID NO: 94, SEQ ID NO: 96, SEQ ID NO: 98, SEQ ID NO: 100, SEQ ID NO: 102, SEQ ID NO: 104, SEQ ID NO: 106, SEQ ID NO: 108, SEQ ID NO: 110, SEQ ID NO: 112, SEQ ID NO: 114, SEQ ID NO: 116, SEQ ID NO: 118, SEQ ID NO: 120, SEQ ID NO: 122, SEQ ID NO: 124, SEQ ID NO: 126, SEQ ID NO: 128, SEQ ID NO: 130, SEQ ID NO: 132, SEQ ID NO: 134, SEQ ID NO: 136, SEQ ID NO: 138, SEQ ID NO: 140, SEQ ID NO: , SEQ ID NO: 142, SEQ ID NO: 151, SEQ ID NO: 153, SEQ ID NO: 155, SEQ ID NO: 157, SEQ ID NO: 159, SEQ ID NO: 161, SEQ ID NO: 163, SEQ ID NO: 165, SEQ ID NO: 167, SEQ ID NO: 169, SEQ ID NO: 171, SEQ ID NO: 173, SEQ ID NO: 175, SEQ ID NO: 177, SEQ ID NO: 179, SEQ ID NO: 181, SEQ ID NO: 183, SEQ ID NO: 185, SEQ ID NO: 187, SEQ ID NO: 189, SEQ ID NO: 191, SEQ ID NO: 193, SEQ ID NO: 195, SEQ ID NO: 197, SEQ ID NO: 199, SEQ ID NO: 201, SEQ ID NO: 203, SEQ ID NO: 205, SEQ ID NO: 207, SEQ ID NO: 209, SEQ ID NO: 211, SEQ ID NO: 213, SEQ ID NO: 215, SEQ ID NO: 217, SEQ ID NO: 219, SEQ ID NO: 228, SEQ ID NO: 230, SEQ ID NO: 232, SEQ ID NO: 234, SEQ ID NO: 236, SEQ ID NO: 238, SEQ ID NO: 240, SEQ ID NO: 242, SEQ ID NO: 249, SEQ ID NO: 251, SEQ ID NO: 253, SEQ ID NO: 255, SEQ ID NO: 257, SEQ ID NO: 259, SEQ ID NO: 261, SEQ ID NO: 263, SEQ ID NO: 265, SEQ ID NO: 267, SEQ ID NO: 269, SEQ ID NO: 271, SEQ ID NO: 282, SEQ ID NO: 284, SEQ ID NO: 286, SEQ ID NO: 288, SEQ ID NO: 290, SEQ ID NO: 292, SEQ ID NO: 294, SEQ ID NO: 296, SEQ ID NO: 298, SEQ ID NO: 300, SEQ ID NO: 302, SEQ ID NO: 304, SEQ ID NO: 306, SEQ ID NO: 308, SEQ ID NO: 310, SEQ ID NO: 312, SEQ ID NO: 314, SEQ ID NO: 316, SEQ ID NO: 318, SEQ ID NO: 320, SEQ ID NO: 322, SEQ ID NO: 324, SEQ ID NO: 326, SEQ ID NO: 328, SEQ ID NO: 330, SEQ ID NO: 332, SEQ ID NO: 334, SEQ ID NO: 336, SEQ ID NO: 338, SEQ ID NO: 340, SEQ ID NO: 342, SEQ ID NO: 344, SEQ ID NO: 346, SEQ ID NO: 348, SEQ ID NO: 350, SEQ ID NO: 352, SEQ ID NO: 354, SEQ ID NO: 356, SEQ ID NO: 358, SEQ ID NO: 360, SEQ ID NO: 362, SEQ ID NO: 364, SEQ ID NO: 366, SEQ ID NO: 368, SEQ ID NO: 370, SEQ ID NO: 372, SEQ ID NO: 374, SEQ ID NO: 376, SEQ ID NO: 378, SEQ ID NO: 380, SEQ ID NO: 382, SEQ ID NO: 384, SEQ ID NO: 386, SEQ ID NO: 388, SEQ ID NO: 390, SEQ ID NO: 392, SEQ ID NO: 394, SEQ ID NO: 396, SEQ ID NO: 398, SEQ ID NO: 400, SEQ ID NO: 402, SEQ ID NO: 404, SEQ ID NO: 406, SEQ ID NO: 408, SEQ ID NO: 410, SEQ ID NO: 412, SEQ ID NO: 414, SEQ ID NO: 416, SEQ ID NO: 418, SEQ ID NO: 420, SEQ ID NO: 422, SEQ ID NO: 424, SEQ ID NO: 426, SEQ ID NO: 428, SEQ ID NO: 430, SEQ ID NO: 432, SEQ ID NO: 434 or SEQ ID NO: 440 or homologs thereof, then find the promoter and reduce expression by the use of the abovementioned factors.

[0157] The skilled worker is familiar with the methods required for doing so.

[0158] Furthermore, factors which are introduced into a cell may also be those which themselves inhibit the target protein. The protein-binding factors can, for example, be aptamers [Famulok M and Mayer G (1999) Curr. Top Microbiol. Immunol. 243: 123-36] or antibodies or antibody fragments or single-chain anti bodies. Obtaining these factors has been described, and the skilled worker is familiar therewith. For example, a cytoplasmic scFv antibody has been employed for modulating activity of the phytochrome A protein in genetically modified tobacco plants [Owen M et al (1992) Biotechnology (NY) 10(7): 790-794; Franken E et al. (1997) Curr. Opin. Biotechnol. 8(4): 411-416; Whitelam (1996) Trend Plant Sci. 1: 286-272].

[0159] Gene expression may also be suppressed by tailor-made low-molecular-weight synthetic compounds, for example of the polyamide type [Dervan P B and Bürli R W (1999) Current Opinion in Chemical Biology 3: 688-693; Gottesfeld J M et al. (2000) Gene Expr. 9(1-2): 77-91]. These oligomers consist of the units 3-(dimethylamino)propylamine, N-methyl-3-hydroxypyrrole, N-methylimidazole and N-methylpyrroles; they can be adapted to each portion of double-stranded DNA in such a way that they bind sequence-specifically to the large groove and block the expression of the gene sequences located in this position. Suitable methods have been described in Bremer R E et al. [(2001) Bioorg. Med. Chem. 9(8): 2093-103], Ansari A Z et al. [(2001) Chem. Biol. 8(6): 583-92], Gottesfeld J M et al. [(2001) J. Mol. Biol. 309(3): 615-29], Wurtz N R et al. [(2001) Org. Lett 3(8): 1201-3], Wang C C et al. [(2001) Bioorg. Med. Chem. 9(3): 653-7], Urbach A R and Dervan P B [(2001) Proc. Natl. Acad. Sci. USA 98(8): 434103-8] and Chiang S Y et al. [(2000) J. Biol. Chem. 275(32): 24246-54].

[0160] G) Introduction of Viral Nucleic Acid Sequences and Expression Constructs which Bring about the Degradation of RNA

[0161] Inactivation or downregulation can also be efficiently brought about by inducing specific RNA degradation by the organism, advantageously in the plant, with the aid of a viral expression system (Amplikon) [Angell, S M et al. (1999) Plant J. 20(3): 357-362]. Nucleic acid sequences with homology to the transcripts to be suppressed are introduced into the plant by these systems—also referred to as “VIGS” (viral induced gene silencing) with the aid of viral vectors. Then, transcription is switched off, presumably mediated by plant defense mechanisms against viruses. Suitable techniques and methods are described in Ratcliff F et al. [(2001) Plant J. 25(2): 237-45], Fagard M and Vaucheret H [(2000) Plant Mol. Biol. 43(2-3): 285-93], Anandalakshmi R et al. [(1998) Proc. Natl. Acad. Sci. USA 95(22): 13079-84] and Ruiz M T [(1998) Plant Cell 10(6): 937-46].

[0162] H) Introduction of Constructs for Inducing a Homologous Recombination on Endogenous Genes, for Example for Generating Knock-Out Mutants

[0163] To generate a homologously-recombinant organism with reduced activity, a nucleic acid construct is used which, for example, comprises at least part of an endogenous gene which is modified by a deletion, addition or substitution of at least one nucleotide in such a way that the functionality is reduced or completely eliminated. The modification may also affect the regulatory elements (for example the promoter) of the gene so that the coding sequence remains unmodified, but expression (transcription and/or translation) does not take place or is reduced.

[0164] In the case of conventional homologous recombination, the modified region is flanked at its 5′ and 3′ end by further nucleic acid sequences, which must be sufficiently long for allowing recombination. Their length is, as a rule, in a range of from one hundred bases up to several kilobases [Thomas K R and Capecchi M R (1987) Cell 51: 503; Strepp et al. (1998) Proc. Natl. Acad. Sci. USA 95(8): 4368-4373]. In the case of homologous recombination, the host organism—for example a plant—is transformed with the recombination construct using the methods described herein below, and clones, which have successfully undergone recombination are selected using for example a resistance to antibiotics or herbicides. Using the cotransformation technique, the resistance to antibiotics or herbicides can subsequently advantageously be re-eliminated by performing crosses. An example for an efficient homologous recombination system in plants has been published in Nat. Biotechnol. 2002 October; 20(10):1030-4, Terada R et al.: Efficient gene targeting by homologous recombination in rice.

[0165] Homologous recombination is a relatively rare event in higher eukaryotes, especially in plants. Random integrations into the host genome predominate. One possibility of removing the randomly integrated sequences and thus increasing the number of cell clones with a correct homologous recombination is the use of a sequence-specific recombination system as described in U.S. Pat. No. 6,110,736, by means of which unspecifically integrated sequences can be deleted again, which simplifies the selection of events which have integrated successfully via homologous recombination. A multiplicity of sequence-specific recombination systems may be used, examples which may be mentioned being Cre/lox system of bacteriophage P1, the FLP/FRT system from yeast, the Gin recombinase of phage Mu, the Pin recombinase from E. coli and the R/RS system of the pSR1 plasmid. The bacteriophage P1 Cre/lox system and the yeast FLP/FRT system are preferred. The FLP/FRT and the cre/lox recombinase system have already been applied to plant systems [Odell et al. (1990) Mol. Gen. Genet. 223: 369-378].

[0166] I) Introduction of Mutations into Endogenous Genes for Bringing About a Loss of Function (For Example Generation of Stop Codons, Reading-Frame Shifts and the Like)

[0167] Further suitable methods for reducing activity are the introduction of nonsense mutations into endogenous genes, for example by introducing RNA/DNA oligonucleotides into the plant [Zhu et al. (2000) Nat. Biotechnol. 18(5): 555-558], and the generation of knock-out mutants with the aid of, for example, T-DNA mutagenesis [Koncz et al. (1992) Plant Mol. Biol. 20(5): 963-976], ENU-(N-ethyl-N-nitrosourea)—mutagenesis or homologous recombination [Hohn B and Puchta (1999) H. Proc. Natl. Acad. Sci. USA 96: 8321-8323]. Point mutations may also be generated by means of DNA-RNA hybrids also known as “chimeraplasty” [Cole-Strauss et al. (1999) Nucl. Acids Res. 27(5): 1323-1330; Kmiec (1999) Gene Therapy American Scientist 87(3): 240-247]. The mutation sites may be specifically targeted or randomly selected. If the mutations have been created randomly e.g. by Transposon-Tagging or chemical mutagenesis, the skilled worked is able to specifically enrich selected mutation events in the inventive nucleic acids.

[0168] Nucleic acid sequences as described in item B) to 1) are expressed in the cell or organism by transformation/transfection of the cell or organism or are introduced in the cell or organism by known methods, for example as disclosed in item A).

[0169] In one further embodiment of the process according to the invention, organisms are used in which one of the abovementioned genes, or one of the above-mentioned nucleic acids, is mutated in such a manner that the activity of the encoded gene products is influenced by cellular factors to a greater extent than in the reference organism, as compared with the unmutated proteins. This kind of mutation could lead to a change in the metabolic activity of the organism, which than causes in a higher production of the fine chemical. The reason for this higher productivity can be due to a change in regulation mechanism of enzymic activity such as substrate inhibition or feed back regulation. In a further embodiment the process according to the invention, organisms are grown under such conditions, that the expression of the nucleic acids of the invention is reduced or repressed leading to an enhanced production of the fine chemical according to the invention.

[0170] Owing to the reduction or deletion of a gene or a plurality of genes conferring the expression of the nucleic acid molecule of the invention or the polypeptide of the invention, for example the nucleic acid construct mentioned below, into an organism alone or in combination with other genes, it is possible not only to increase the biosynthetic flux towards the end product, but also to increase, modify or create de novo an advantageous, preferably novel metabolites composition in the organism, e.g. an advantageous amino acid composition comprising a higher content of from a viewpoint of nutritional physiology limited amino acids, like methionine or lysine combined with higher amounts of metabolites positively affecting or lower amounts of metabolites negatively affecting the nutrition or health of animals or humans provided with said compositions or organisms of the invention or parts thereof. Likewise, the number or activity of further genes which are required for the import or export of nutrients or metabolites, including amino acids or its precursors, required for the cell's biosynthesis of amino acids may be increased so that the concentration of necessary or relevant precursors, cofactors or intermediates within the cell(s) or within the corresponding storage compartments is increased. Owing to the reduced, decreased or deleted activity of the polypeptide of the invention or owing to the reduced or decreased number of nucleic acid sequences of the invention and/or to the modulation of further genes which are involved in the biosynthesis of the amino acids, e.g. by increasing the activity of enzymes synthesizing precursors or by destroying the activity of one or more genes which are involved in the breakdown of the amino acids, it is possible to increase the yield, production and/or production efficiency of amino acids in the host organism, such as the plants or the microorganisms.

[0171] By influencing the metabolism thus, it is possible to produce, in the process according to the invention, further advantageous sulfur-containing compounds, which contain at least one sulfur atom bound covalently. Examples of such compounds are, in addition to methionine, homocysteine, S-adenosylmethionine, cysteine, advantageously methionine and S-adenosylmethionine.

[0172] Accordingly, in one embodiment, the process according to the invention relates to a process which comprises
[0173] a) providing a non-human organism, preferably a microorganism, non-human animal, a plant cell, a plant tissue or a plant;
[0174] b) reducing, decreasing or deleting the activity in the organism, preferably in the microorganism, the non-human animal, the plant cell, the plant tissue or the plant, of a protein having the biological activity of the protein of the invention or being encoded by the nucleic acid molecule of the present invention and described below, e.g. having above mentioned activity, e.g. conferring an increase of the fine chemical;
[0175] c) growing the organism, preferably the microorganism, non-human animal, the plant cell, the plant tissue or the plant under conditions which permit the production of the fine chemical in the organism, preferably the microorganism, the plant cell, the plant tissue or the plant; and
[0176] d) if desired, recovering, optionally isolating, the free and/or bound methionine and, optionally further free and/or bound amino acids synthesized by the organism, the microorganism, the non-human animal, the plant or animal cell, the plant or animal tissue or the plant.

[0177] The organism, in particular the microorganism, non-human animal, the plant or animal cell, the plant or animal tissue or the plant is advantageously grown in such a manner that it is not only possible to recover, if desired isolate the free or bound methionine or the free and bound methionine but as option it is also possible to produce, recover and, if desired isolate, other free or/and bound amino acids, in particular methionine. Galili et al., Transgenic Res., 200, 9, 2, 137-144 describes that the heterologous expression of a bacterial gene for the amino acid biosynthesis confers the increase of free as well as of protein-bound amino acids.

[0178] After the above-described reducing, decreasing or deleting (which as defined above also encompasses the generating of an activity in an organism, i.e. a de novo activity), for example after the introduction and the expression of the an RNAi molecule, antisense molecule or ribozyme described in the methods or processes according to the invention, the organism according to the invention, advantageously, a microorganism, a non-human animal, a plant, plant or animal tissue or plant or animal cell, is grown and subsequently harvested.

[0179] Suitable organisms or host organisms (transgenic organism) for the nucleic acid molecule used according to the invention and for the inventive process, the nucleic acid construct or the vector (both as described below) are, in principle, all organisms which are capable of synthesizing the fine chemical, and which are suitable for the repression, reduction or deletion of recombinant genes. Examples which may be mentioned are transgenic plants, cells or protoplasts thereof, transgenic microorganisms such as fungi, bacteria, yeasts, alga or diatom, cells or protoplasts thereof. Preferred organisms are those which are naturally capable of synthesizing the fine chemical in substantial amounts, like fungi, yeasts, bacteria or plants. In principle, transgenic animals, for example Caenorhabditis elegans, are also suitable as host organisms.

[0180] In the event that the transgenic organism is a microorganism, such as a eukaryotic organism, for example a fungus, an alga, diatom or a yeast in particular a fungus, alga, diatom or yeast selected from the families Chaetomiaceae, Choanephoraceae, Cryptococcaceae, Cunninghamellaceae, Demetiaceae, Moniliaceae, Mortierellaceae, Mucoraceae, Pythiaceae, Sacharomycetaceae, Saprolegniaceae, Schizosacharomycetaceae, Sodariaceae, Sporobolomycetaceae Tuberculariaceae, Adelotheciaceae, Dinophyceae, Ditrichaceae or Prasinophyceae, or a prokaryotic organism, for example a bacterium or blue alga, in particular a bacterium from the families Actinomycetaceae, Bacillaceae, Brevibacteriaceae, Corynebacteriaceae, Enterobacteriacae, Gordoniaceae, Nocardiaceae, Micrococcaceae, Mycobacteriaceae, Pseudomonaceae, Rhizobiaceae or Streptomycetaceae, this microorganism is grown on a solid or in a liquid medium which is known to the skilled worker and suits the organism. After the growing phase, the organisms can be harvested. The microorganisms or the recovered, and if desired isolated, amino acids can then be processed further directly into foodstuffs or animal feeds or for other applications, for example according to the disclosures made in EP-B-O 533 039 or EP-A-0 615 693, which are expressly incorporated herein by reference. The fermentation broth or fermentation products can be purified in the customary manner by extraction and precipitation or via ion exchangers and other methods known to the person skilled in the art and described herein below. Products of these different work-up procedures are amino acids or amino acid compositions which still comprise fermentation broth and cell components in different amounts, advantageously in the range of from 0 to 99% by weight, preferably below 80% by weight, especially preferably between below 50% by weight.

[0181] Preferred microorganisms are selected from the group consisting of Chaetomiaceae such as the genera Chaetomium e.g. the species Chaetomidium fimeti; Choanephoraceae such as the genera Blakeslea, Choanephora e.g. the species Blakeslea trispora, Choanephora cucurbitarum or Choanephora infundibulifera var. cucurbitarum; Cryptococcaceae such as the genera Candida, Crytococcus, Rhodotorula, Torulopsis e.g. the species Candida albicans, Candida albomarginata, Candida antarctica, Candida bacarum, Candida bogoriensis, Candida boidinii, Candida bovina, Candida brumptii, Candida cacaoi, Candida cariosilignicola, Candida catenulata, Candida chalmersii, Candida cifemmi, Candida cylindracea, Candida edax, Candida ernobii, Candida famata, Candida freyschussii, Candida friedrichii, Candida glabrata, Candida guilliermondii, Candida haemulonii, Candida humicola, Candida inconspicua, Candida ingens, Candida intermedia, Candida kefyr, Candida krusei, Candida lactiscondensi, Candida lambica, Candida lipolytica, Candida lusitaniae, Candida macedoniensis, Candida magnoliae, Candida membranaefaciens, Candida mesenterica, Candida multigemmis, Candida mycoderma, Candida nemodendra, Candida nitratophila, Candida norvegensis, Candida norvegica, Candida parapsilosis, Candida pelliculosa, Candida peltata, Candida pini, Candida pseudotropicalis, Candida pulcherrima, Candida punicea, Candida pustula, Candida ravautii, Candida reukaufii, Candida rugosa, Candida sake, Candida silvicola, Candida solani, Candida sp., Candida spandovensis, Candida succiphila, Candida tropicalis, Candida utilis, Candida valida, Candida versatilis, Candida vini, Candida zeylanoides, Cryptococcus albidus, Cryptococcus curvatus, Cryptococcus flavus, Cryptococcus humicola, Cryptococcus hungaricus, Cryptococcus kuetzingii, Cryptococcus laurentii, Cryptococcus macerans, Cryptococcus neoformans, Cryptococcus terreus, Cryptococcus uniguttulatus, Rhodotorula acheniorum, Rhodotorula bacarum, Rhodotorula bogoriensis, Rhodotorula flava, Rhodotorula glutinis, Rhodotorula macerans, Rhodotorula minuta, Rhodotorula mucilaginosa, Rhodotorula pilimanae, Rhodotorula pustula, Rhodotorula rubra, Rhodotorula tokyoensis, Torulopsis colliculosa, Torulopsis dattila or Torulopsis neoformans; Cunninghamellaceae such as the genera Cunninghamella e.g. the species Cunninghamella blakesleeana, Cunninghamella echinulata, Cunninghamella echinulata var. elegans, Cunninghamella elegans or Cunninghamella homothallica; Demetiaceae such as the genera Alternaria, Bipolaris, Cercospora, Chalara, Cladosporium, Curvularia, Exophilia, Helicosporium, Helminthosporium, Orbimyces, Philalophora, Pithomyces, Spilocaea, Thielaviopsis, Wangiella e.g. the species Curvularia affinis, Curvularia clavata, Curvularia fallax, Curvularia inaequalis, Curvularia indica, Curvularia lunata, Curvularia pallescens, Curvularia verruculosa or Helminothosporium sp.; Moniliaceae such as the genera Arthrobotrys, Aspergillus, Epidermophyton, Geotrichum, Gliocladium, Histoplasma, Microsporum, Monilia, Oedocephalum, Oidium, Penicillium, Trichoderma, Trichophyton, Thrichoteclum, Verticillium e.g. the species Aspergillus aculeatus, Aspergillus albus, Aspergillus alliaceus, Aspergillus asperescens, Aspergillus awamori, Aspergillus candidus, Aspergillus carbonarius, Aspergillus carneus, Aspergillus chevalieri, Aspergillus chevalieri var. intermedius, Aspergillus clavatus, Aspergillus ficuum, Aspergillus flavipes, Aspergillus flavus, Aspergillus foetidus, Aspergillus fumigatus, Aspergillus giganteus, Aspergillus humicola, Aspergillus intermedius, Aspergillusjaponicus, Aspergillus nidulans, Aspergillus niger, Aspergillus niveus, Aspergillus ochraceus, Aspergillus oryzae, Aspergillus ostianus, Aspergillus parasiticus, Aspergillus parasiticus var. globosus, Aspergillus penicillioides, Aspergillus phoenicis, Aspergillus rugulosus, Aspergillus sclerotiorum, Aspergillus sojae var. gymnosardae, Aspergillus sydowi, Aspergillus tamarii, Aspergillus terreus, Aspergillus terricola, Aspergillus toxicarius, Aspergillus unguis, Aspergillus ustus, Aspergillus versicolor, Aspergillus vitricolae, Aspergillus wentii, •Penicillium adametzi, Penicillium albicans, Penicillium arabicum, Penicillium arenicola, Penicillium argillaceum, Penicillium arvense, Penicillium asperosporum, •Penicillium aurantiogriseum, Penicillium avellaneum, •Penicillium baarnense, •Penicillium bacillisporum, Penicillium brasilianum, •Penicillium brevicompactum, •Penicillium camemberti, •Penicillium canadense, •Penicillium canescens, •Penicillium caperatum, •Penicillium capsulatum, Penicillium caseicolum, •Penicillium chrysogenum, •Penicillium citreonigrum, •Penicillium citrinum, •Penicillium claviforme, •Penicillium commune, •Penicillium corylophilum, Penicillium corymbiferum, •Penicillium crustosum, •Penicillium cyclopium, •Penicillium daleae, •Penicillium decumbens, •Penicillium dierckxii, •Penicillium digitatum, •Penicillium digitatum var. latum, •Penicillium divaricatum, •Penicillium diversum, •Penicillium duclauxii, Penicillium echinosporum, •Penicillium expansum, •Penicillium fellutanum, Penicillium frequentans, •Penicillium funiculosum, •Penicillium glabrum, •Penicillium gladioli, •Penicillium griseofulvum, •Penicillium hirsutum, •Penicillium hispanicum, Penicillium islandicum, •Penicillium italicum, •Penicillium italicum var. avellaneum, Penicillium janczewskii, •Penicillium janthinellum, •Penicillium japonicum, •Penicillium lavendulum, •Penicillium lilacinum, •Penicillium lividum, •Penicillium martensii, Penicillium megasporum, •Penicillium miczynskii, •Penicillium nalgiovense, •Penicillium nigricans, Penicillium notatum, •Penicillium ochrochloron, •Penicillium odoratum, •Penicillium oxalicum Penicillium paraherquei, •Penicillium patulum, •Penicillium pinophilum, Penicillium piscarium, •Penicillium pseudostromaticum, •Penicillium puberulum Penicillium purpurogenum, •Penicillium raciborskii, •Penicillium roqueforti, •Penicillium rotundum, •Penicillium rubrum, •Penicillium sacculum, •Penicillium simplicissimum, Penicillium sp., Penicillium spinulosum, Penicillium steckii, Penicillium stoloniferum, Penicillium striatisporum, Penicillium striatum, Penicillium tardum, Penicillium thomii, Penicillium turbatum, Penicillium variabile, Penicillium vermiculatum, Penicillium vermoesenii, Penicillium verrucosum, Penicillium verrucosum var. corymbiferum, Penicillium verrucosum var. cyclopium, Penicillium verruculosum, Penicillium vinaceum, Penicillium violaceum, Penicillium viridicatum, Penicillium vulpinum, Trichoderma hamatum, Trichoderma harzianum, Trichoderma koningii, Trichoderma longibrachiatum, Trichoderma polysporum, Trichoderma reesei, Trichoderma virens or Trichoderma viride; Mortierellaceae such as the genera Mortierella e.g. the species Mortierella isabellina, Mortierella polycephala, Mortierella ramanniana, Mortierella vinacea or Mortierella zonata; Mucoraceae such as the genera Actinomucor, Mucor, Phycomyces, Rhizopus, Zygorhynchus e.g. the species Mucor amphibiorum, Mucor circinelloides f. circinelloides, Mucor circinelloides var. griseocyanus, Mucor flavus, Mucor fuscus, Mucor griseocyanus, Mucor heterosporus, Mucor hiemalis, Mucor hiemalis f. hiemalis, Mucor inaequisporus, Mucor indicus, Mucorjavanicus, Mucor mucedo, Mucor mucilagineus, Mucor piriformis, Mucor plasmaticus, Mucor plumbeus, Mucor racemosus, Mucor racemosus f. racemosus, Mucor racemosus f. sphaerosporus, Mucor rouxianus, Mucor rouxii, Mucor sinensis, Mucor sp., Mucor spinosus, Mucor tuberculisporus, Mucor variisporus, Mucor variosporus, Mucor wosnessenskii, Phycomyces blakesleeanus, Rhizopus achlamydosporus, Rhizopus arrhizus, Rhizopus chinensis, Rhizopus delemar, Rhizopus formosaensis, Rhizopusjaponicus, Rhizopus javanicus, Rhizopus microsporus, Rhizopus microsporus var. chinensis, Rhizopus microsporus var. oligosporus, Rhizopus microsporus var. rhizopodiformis, Rhizopus nigricans, Rhizopus niveus, Rhizopus oligosporus, Rhizopus oryzae, Rhizopus pygmaeus, Rhizopus rhizopodiformis, Rhizopus semarangensis, Rhizopus sontii, Rhizopus stolonifer, Rhizopus thermosus, Rhizopus tonkinensis, Rhizopus tritici or Rhizopus usamii; Pythiaceae such as the genera Phytium; Phytophthora e.g. the species Pythium debaryanum, Pythium intermedium, Pythium irregulare, Pythium megalacanthum, Pythium paroecandrum, Pythium sylvaticum, Pythium ultimum, Phytophthora cactorum, Phytophthora cinnamomi, Phytophthora citricola, Phytophthora citrophthora, Phytophthora cryptogea, Phytophthora drechsleri, Phytophthora erythroseptica, Phytophthora lateralis, Phytophthora megasperma, Phytophthora nicotianae, Phytophthora nicotianae var. parasitica, Phytophthora palmivora, Phytophthora parasitica or Phytophthora syringae; Sacharomycetaceae such as the genera Hansenula, Pichia, Saccharomyces, Saccharomycodes, Yarrowia e.g. the species Hansenula anomala, Hansenula californica, Hansenula canadensis, Hansenula capsulata, Hansenula ciferrii, Hansenula glucozyma, Hansenula henricii, Hansenula holstii, Hansenula minuta, Hansenula nonfermentans, Hansenula philodendri, Hansenula polymorpha, Hansenula saturnus, Hansenula subpelliculosa, Hansenula wickerhamii, Hansenula wingei, Pichia alcoholophila, Pichia angusta, Pichia anomala, Pichia bispora, Pichia burtonii, Pichia canadensis, Pichia capsulata, Pichia carsonii, Pichia cellobiosa, Pichia ciferrii, Pichia farinosa, Pichia fermentans, Pichia finlandica, Pichia glucozyma, Pichia guilliermondii, Pichia haplophila, Pichia henricii, Pichia holstii, Pichia jadinii, Pichia lindnerii, Pichia membranaefaciens, Pichia methanolica, Pichia minuta var. minuta, Pichia minuta var. nonfermentans, Pichia norvegensis, Pichia ohmeri, Pichia pastoris, Pichia philodendri, Pichia pini, Pichia polymorpha, Pichia quercuum, Pichia rhodanensis, Pichia sargentensis, Pichia stipitis, Pichia strasburgensis, Pichia subpelliculosa, Pichia toletana, Pichia trehalophila, Pichia vini, Pichia xylosa, Saccharomyces aceti, Saccharomyces bailii, Saccharomyces bayanus, Saccharomyces bisporus, Saccharomyces capensis, Saccharomyces carlsbergensis, Saccharomyces cerevisiae, Saccharomyces cerevisiae var. ellipsoideus, Saccharomyces chevalieri, Saccharomyces delbrueckii, Saccharomyces diastaticus, Saccharomyces drosophilarum, Saccharomyces elegans, Saccharomyces ellipsoideus, Saccharomyces fermentati, Saccharomyces florentinus, Saccharomyces fragilis, Saccharomyces heterogenicus, Saccharomyces hienipiensis, Saccharomyces inusitatus, Saccharomyces italicus, Saccharomyces kluyveri, Saccharomyces krusei, Saccharomyces lactis, Saccharomyces marxianus, Saccharomyces microellipsoides, Saccharomyces montanus, Saccharomyces norbensis, Saccharomyces oleaceus, Saccharomyces paradoxus, Saccharomyces pastorianus, Saccharomyces pretoriensis, Saccharomyces rosei, Saccharomyces rouxii, Saccharomyces uvarum, Saccharomycodes ludwigii or Yarrowia lipolytica; Saprolegniaceae such as the genera Saprolegnia e.g. the species Saprolegnia ferax; Schizosacharomycetaceae such as the genera Schizosaccharomyces e.g. the species Schizosaccharomyces japonicus var. japonicus, Schizosaccharomyces japonicus var. versatilis, Schizosaccharomyces malidevorans, Schizosaccharomyces octosporus, Schizosaccharomyces pombe var. malidevorans or Schizosaccharomyces pombe var. pombe; Sodariaceae such as the genera Neurospora, Sordaria e.g. the species Neurospora africana, Neurospora crassa, Neurospora intermedia, Neurospora sitophila, Neurospora tetrasperma, Sordaria fimicola or Sordaria macrospora; Tuberculariaceae such as the genera Epicoccum, Fusarium, Myrothecium, Sphacelia, Starkeyomyces, Tubercularia e.g. the species Fusarium acuminatum, Fusarium anthophilum, Fusarium aquaeductuum, Fusarium aquaeductuum var. medium, Fusarium avenaceum, Fusarium buharicum, Fusarium camptoceras, Fusarium cerealis, Fusarium chlamydosporum, Fusarium ciliatum, Fusarium coccophilum, Fusarium coeruleum, Fusarium concolor, Fusarium crookwellense, Fusarium culmorum, Fusarium dimerum, Fusarium diversisporum, Fusarium equiseti, Fusarium equiseti var. bullatum, Fusarium eumartii, Fusarium flocciferum, Fusarium fujikuroi, Fusarium graminearum, Fusarium graminum, Fusarium heterosporum, Fusarium incarnatum, Fusarium inflexum, Fusarium javanicum, Fusarium lateritium, Fusarium lateritium var. majus, Fusarium longipes, Fusarium melanochlorum, Fusarium merismoides, Fusarium merismoides var. chlamydosporale, Fusarium moniliforme, Fusarium moniliforme var. anthophilum, Fusarium moniliforme var. subglutinans, Fusarium nivale, Fusarium nivale var. majus, Fusarium oxysporum, Fusarium oxysporum f. sp. aechmeae, Fusarium oxysporum f. sp. cepae, Fusarium oxysporum f. sp. conglutinans, Fusarium oxysporum f. sp. cucumerinum, Fusarium oxysporum f. sp. cyclaminis, Fusarium oxysporum f. sp. dianthi, Fusarium oxysporum f. sp. lycopersici, Fusarium oxysporum f. sp. melonis, Fusarium oxysporum f. sp. passiflorae, Fusarium oxysporum f. sp. pisi, Fusarium oxysporum f. sp. tracheiphilum, Fusarium oxysporum f. sp. tuberosi, Fusarium oxysporum f. sp. tulipae, Fusarium oxysporum f. sp. vasinfectum, Fusarium pallidoroseum, Fusarium poae, Fusarium proliferatum, Fusarium proliferatum var. minus, Fusarium redolens, Fusarium redolens f. sp. dianthi, Fusarium reticulatum, Fusarium roseum, Fusarium sacchari var. elongatum, Fusarium sambucinum, Fusarium sambucinum var. coeruleum, Fusarium semitectum, Fusarium semitectum var. majus, Fusarium solani, Fusarium solani f. sp. pisi, Fusarium sporotrichioides, Fusarium sporotrichioides var. minus, Fusarium sublunatum, Fusarium succisae, Fusarium sulphureum, Fusariurn tabacinum, Fusarium tricinctum, Fusarium udum, Fusarium ventricosum, Fusarium verticillioides, Fusarium xylarioides or Fusarium zonatum; Sporobolomycetaceae such as the genera Bullera, Sporobolomyces, Itersonilia e.g. the species Sporobolomyces holsaticus, Sporobolomyces odorus, Sporobolomyces puniceus, Sporobolomyces salmonicolor, Sporobolomyces singularis or Sporobolomyces tsugae; Adelotheciaceae such as the genera e.g. the species Physcomitrella patens; Dinophyceae such as the genera Crypthecodinium, Phaeodactylum e.g. the species Crypthecodinium cohnli or Phaeodactylum tricomutum; Ditrichaceae such as the genera Ceratodon, Pleuridium, Astomiopsis, Ditrichum, Philibertiella, Ceratodon, Distichium, Skottsbergia e.g. the species Ceratodon antarcticus, Ceratodon purpureus, Ceratodon purpureus ssp. convolutes or Ceratodon purpureus ssp. stenocarpus; Prasinophyceae such as the genera Nephroselmis, Prasinococcus, Scherffelia, Tetraselmis, Mantoniella, Ostreococcus e.g. the species Nephroselmis olivacea, Prasinococcus capsulatus, Scherffelia dubia, Tetraselmis chui, Tetraselmis suecica, Mantoniella squamata or Ostreococcus tauri; Actinomycetaceae such as the genera Actinomyces, Actinobaculum, Arcanobacterium, Mobiluncus e.g. the species Actinomyces bernardiae, Actinomyces bovis, Actinomyces bowdeni, Actinomyces canis, Actinomyces cardiffensis, Actinornyces catuli, Actinomyces coleocanis, Actinomyces denticolens, Actinomyces europaeus, Actinomyces funkei, Actinomyces georgiae, Actinomyces gerencseriae, Actinomyces hordeovulneris, Actinomyces howellii, Actinomyces humiferus, Actinomyces hyovaginalis, Actinomyces israeli, Actinomyces marimammalium, Actinomyces meyeri, Actinomyces naeslundii, Actinomyces nasicola, Actinomyces neuii subsp. anitratus, Actinomyces neuii subsp. neuii, Actinomyces odontolyticus, Actinomyces oricola, Actinomyces pyogenes, Actinomyces radicidentis, Actinomyces radingae, Actinomyces slackii, Actinomyces suimastitidis, Actinomyces suis, Actinomyces turicensis, Actinomyces urogenitalis, Actinomyces vaccimaxillae, Actinomyces viscosus, Actinobaculum schaalii, Actinobaculum suis, Actinobaculum urinale, Arcanobacterium bernardiae, Arcanobacterium haemolyticum, Arcanobacterium hippocoleae, Arcanobacterium phocae, Arcanobacterium pluranimalium, Arcanobacterium pyogenes, Mobiluncus curtisii subsp. curtisii, Mobiluncus curtisii subsp. holmesii or Mobiluncus mulieris; Bacillaceae such as the genera Amphibacillus, Anoxybacillus, Bacillus, Exiguobacterium, Gracilibacillus, Holobacillus, Saccharococcus, Salibacillus, Virgibacillus e.g. the species Amphibacillus fermentum, Amphibacillus tropicus, Amphibacillus xylanus, Anoxybacillus flavithermus, Anoxybacillus gonensis, Anoxybacillus pushchinoensis, Bacillus acidocaldarius, Bacillus acidoterrestris, Bacillus aeolius, Bacillus agaradhaerens, Bacillus agri, Bacillus alcalophilus, Bacillus alginolyticus, Bacillus alvei, Bacillus amyloliquefaciens, Bacillus amylolyticus, Bacillus aneurinilyticus, Bacillus aquimaris, Bacillus arseniciselenatis, Bacillus atrophaeus, Bacillus azotofixans, Bacillus azotoformans, Bacillus badius, Bacillus barbaricus, Bacillus benzoevorans, Bacillus borstelensis, Bacillus brevis, Bacillus carboniphilus, Bacillus centrosporus, Bacillus cereus, Bacillus chitinolyticus, Bacillus chondroitinus, Bacillus choshinensis, Bacillus circulans, Bacillus clarkii, Bacillus clausii, Bacillus coagulans, Bacillus cohnii, Bacillus curdlanolyticus, Bacillus cycloheptanicus, Bacillus decolorationis, Bacillus dipsosauri, Bacillus edaphicus, Bacillus ehimensis, Bacillus endophyticus, Bacillus fastidiosus, Bacillus firmus, Bacillus flexus, Bacillus formosus, Bacillus fumarioli, Bacillus funiculus, Bacillus fusiformis, Bacillus sphaericus subsp. fusiformis, Bacillus galactophilus, Bacillus globisporus, Bacillus globisporus subsp. marinus, Bacillus glucanolyticus, Bacillus gordonae, Bacillus halmapalus, Bacillus haloalkaliphilus, Bacillus halodenitrificans, Bacillus halodurans, Bacillus halophilus, Bacillus horikoshii, Bacillus horti, Bacillus infernos, Bacillus insolitus, Bacillus jeotgali, Bacillus kaustophilus, Bacillus kobensis, Bacillus krulwichiae, Bacillus laevolacticus, Bacillus larvae, Bacillus laterosporus, Bacillus lautus, Bacillus lentimorbus, Bacillus lentus, Bacillus licheniformis, Bacillus luciferensis, Bacillus macerans, Bacillus macquariensis, Bacillus marinus, Bacillus marisflavi, Bacillus marismortui, Bacillus megaterium, Bacillus methanolicus, Bacillus migulanus, Bacillus mojavensis, Bacillus mucilaginosus, Bacillus mycoides, Bacillus naganoensis, Bacillus nealsonii, Bacillus neidei, Bacillus niacini, Bacillus okuhidensis, Bacillus oleronius, Bacillus pabuli, Bacillus pallidus, Bacillus pantothenticus, Bacillus parabrevis, Bacillus pasteurii, Bacillus peoriae, Bacillus polymyxa, Bacillus popilliae, Bacillus pseudalcaliphilus, Bacillus pseudofirmus, Bacillus pseudomycoides, Bacillus psychrodurans, Bacillus psychrophilus, Bacillus psychrosaccharolyticus, Bacillus psychrotolerans, Bacillus pulvifaciens, Bacillus pumilus, Bacillus pycnus, Bacillus reuszeri, Bacillus salexigens, Bacillus schlegelii, Bacillus selenitireducens, Bacillus silvestris, Bacillus simplex, Bacillus siralis, Bacillus smithii, Bacillus sonorensis, Bacillus sphaericus, Bacillus sporothermodurans, Bacillus stearothermophilus, Bacillus subterraneus, Bacillus subtilis subsp. spizizenii, Bacillus subtilis subsp. subtilis, Bacillus thermantarcticus, Bacillus thermoaerophilus, Bacillus thermoamylovorans, Bacillus thermoantarcticus, Bacillus thermocatenulatus, Bacillus thermocloacae, Bacillus thermodenitrificans, Bacillus thermoglucosidasius, Bacillus thermoleovorans, Bacillus thermoruber, Bacillus thermosphaericus, Bacillus thiaminolyticus, Bacillus thuringiensis, Bacillus tusciae, Bacillus validus, Bacillus vallismorfis, Bacillus vedderi, Bacillus vulcani, Bacillus weihenstephanensis, Exiguobacterium acetylicum, Exiguobacterium antarcticum, Exiguobacterium aurantiacum, Exiguobacterium undae, Gracilibacillus dipsosauri, Gracilibacillus halotolerans, Halobacillus halophilus, Halobacillus karajensis, Halobacillus litoralis, Halobacillus salinus, Halobacillus trueperi, Saccharococcus caldoxylosilyticus, Saccharococcus thermophilus, Salibacillus marismortui, Salibacillus salexigens, Virgibacillus carmonensis, Virgibacillus marismortui, Virgibacillus necropolis, Virgibacillus pantothenticus, Virgibacillus picturae, Virgibacillus proomii or Virgibacillus salexigens, Brevibacteriaceae such as the genera Brevibacterium e.g. the species Brevibacterium acetylicum, Brevibacterium albidum, Brevibacterium ammoniagenes, Brevibacterium avium, Brevibacterium casei, Brevibacterium citreum, Brevibacterium divaricatum, Brevibacterium epidermidis, Brevibacterium fermentans, Brevibacterium frigoritolerans, Brevibacterium halotolerans, Brevibacterium imperiale, Brevibacterium incertum, Brevibacterium iodinum, Brevibacterium linens, Brevibacterium liquefaciens, Brevibacterium lutescens, Brevibacterium luteum, Brevibacterium lyticum, Brevibacterium mcbrellneri, Brevibacterium otitidis, Brevibacterium oxydans, Brevibacterium paucivorans, Brevibacterium protophormiae, Brevibacterium pusillum, Brevibacterium saperdae, Brevibacterium stationis, Brevibacterium testaceum or Brevibacterium vitaeruminis; Corynebacteriaceae such as the genera Corynebacterium e.g. the species Corynebacterium accolens, Corynebacterium afermentans subsp. afermentans, Corynebacterium afermentans subsp. lipophilum, Corynebacterium ammoniagenes, Corynebacterium amycolatum, Corynebacterium appendicis, Corynebacterium aquilae, Corynebacterium argentoratense, Corynebacterium atypicum, Corynebacterium aurimucosum, Corynebacterium auris, Corynebacterium auriscanis, Corynebacterium betae, Corynebacterium beticola, Corynebacterium bovis, Coryrnebacterium callunae, Corynebacterium camporealensis, Corynebacterium capitovis, Corynebacterium casei, Corynebacterium confusum, Corynebacterium coyleae, Corynebacterium cystitidis, Corynebacterium durum, Corynebacterium efficiens, Corynebacterium equi, Corynebacterium falsenii, Corynebacterium fascians, Corynebacterium felinum, Corynebacterium flaccumfaciens, Corynebacterium flavescens, Corynebacterium freneyi, Corynebacterium glaucum, Corynebacterium glucuronolyticum, Corynebacterium glutamicum, Corynebacterium hoagii, Corynebacterium ilicis, Corynebacterium imitans, Corynebacterium insidiosum, Corynebacterium iranicum, Corynebacterium jeikeium, Corynebacterium kroppenstedtii, Corynebacterium kutscheri, Corynebacterium lilium, Corynebacterium lipophiloflavum, Corynebacteriurn macginleyi, Corynebacterium mastitidis, Corynebacterium matruchotii, Corynebacterium michiganense, Corynebacterium michiganense subsp. tessellarius, Corynebacterium minutissimum, Corynebacterium mooreparkense, Corynebacterium mucifaciens, Corynebacterium mycetoides, Corynebacterium nebraskense, Corynebacterium oortii, Corynebacterium paurometabolum, Corynebacterium phocae, Corynebacterium pilosum, Corynebacterium poinsettiae, Corynebacterium propinquum, Corynebacterium pseudodiphtheriticum, Corynebacterium pseudotuberculosis, Corynebacterium pyogenes, Corynebacterium rathayi, Corynebacterium renale, Corynebacterium riegelii, Corynebacterium seminale, Corynebacterium sepedonicum, Corynebacterium simulans, Corynebacterium singulare, Corynebacterium sphenisci, Corynebacterium spheniscorum, Corynebacterium striatum, Corynebacterium suicordis, Corynebacterium sundsvallense, Corynebacterium terpenotabidum, Corynebacterium testudinoris, Corynebacterium thomssenii, Corynebacterium tritici, Corynebacterium ulcerans, Corynebacterium urealyticum, Corynebacterium variabile, Corynebacterium vitaeruminis or Corynebacterium xerosis; Enterobacteriacae such as the genera Alterococcus, Arsenophonus, Brenneria, Buchnera, Budvicia, Buttiauxella, Calymmatobacterium, Cedecea, Citrobacter, Edwardsiella, Enterobacter, Erwinia, Escherichia, Ewingella, Hafnia, Klebsiella, Kluyvera, Leclercia, Leminorella, Moellerella, Morganella, Obesumbacterium, Pantoea, Pectobacterium, Photorhabdus, Plesiomonas, Pragia, Proteus, Providencia, Rahnella, Saccharobacter, Salmonella, Shigella, Serratia, Sodalis, Tatumella, Trabulsiella, Wigglesworthia, Xenorhabdus, Yersinia and Yokenella e.g. the species Arsenophonus nasoniae, Brenneria alni, Brenneria nigrifluens, Brenneria quercina, Brenneria rubrifaciens, Brenneria salicis, Budvicia aquatica, Buttiauxella agrestis, Buttiauxella brennerae, Buttiauxella ferragutiae, Buttiauxella gaviniae, Buttiauxella izardii, Buttiauxella noackiae, Buttiauxella warmboldiae, Cedecea davisae, Cedecea lapagei, Cedecea neteri, Citrobacter amalonaticus, Citrobacter diversus, Citrobacter freundii, Citrobacter genomospecies, Citrobacter gillenii, Citrobacter intermedium, Citrobacter koseri, Citrobacter murliniae, Citrobacter sp., Edwardsiella hoshinae, Edwardsiella ictaluri, Edwardsiella tarda, Erwinia alni, Erwinia amylovora, Erwinia ananatis, Erwinia aphidicola, Erwinia billingiae, Erwinia cacticida, Erwinia cancerogena, Erwinia camegieana, Erwinia carotovora subsp. atroseptica, Erwinia carotovora subsp. betava sculorum, Erwinia carotovora subsp. odorifera, Erwinia carotovora subsp. wasabiae, Erwinia chrysanthemi, Erwinia cypripedii, Erwinia dissolvens, Erwinia herbicola, Erwinia mallotivora, Erwinia milletiae, Erwinia nigrifluens, Erwinia nimipressuralis, Erwinia persicina, Erwinia psidii, Erwinia pyrifoliae, Erwinia quercina, Erwinia rhapontici, Erwinia rubrifaciens, Erwinia salicis, Erwinia stewartii, Erwinia tracheiphila, Erwinia uredovora, Escherichia adecarboxylata, Escherichia anindolica, Escherichia aurescens, Escherichia blattae, Escherichia coli, Escherichia coli var. communior, Escherichia coli-mutabile, Escherichia fergusonil, Escherichia hermannii, Escherichia sp., Escherichia vulneris, Ewingella americana, Hafnia alvei, Klebsiella aerogenes, Klebsiella edwardsii subsp. atlantae, Klebsiella ornithinolytica, Klebsiella oxytoca, Klebsiella planticola, Klebsiella pneumoniae, Klebsiella pneumoniae subsp. pneumoniae, Klebsiella sp., Klebsiella terrigena, Klebsiella trevisanii, Kluyvera ascorbata, Kluyvera citrophila, Kluyvera cochleae, Kluyvera cryocrescens, Kluyvera georgiana, Kluyvera noncitrophila, Kluyvera sp., Leclercia adecarboxylata, Leminorella grimontii, Leminorella richardii, Moellerella wisconsensis, Morganella morganii, Morganella morganii subsp. morganii, Morganella morganii subsp. sibonii, Obesumbaterium proteus, Pantoea agglomerans, Pantoea ananatis, Pantoea citrea, Pantoea dispersa, Pantoea punctata, Pantoea stewartii subsp. stewartii, Pantoea terrea, Pectobacterium atrosepticum, Pectobacterium carotovorum subsp. atrosepticum, Pectobacterium carotovorum subsp. carotovorum, Pectobacterium chrysanthemi, Pectobacterium cypripedii, Photorhabdus asymbiotica, Photorhabdus luminescens, Photorhabdus luminescens subsp. akhurstii, Photorhabdus luminescens subsp. laumondii, Photorhabdus luminescens subsp. luminescens, Photorhabdus sp., Photorhabdus temperata, Plesiomonas shigelloides, Pragia fontium, Proteus hauseri, Proteus ichthyosmius, Proteus inconstans, Proteus mirabilis, Proteus morganii, Proteus myxofaciens, Proteus penneri, Proteus rettgeri, Proteus shigelloides, Proteus vulgaris, Providencia alcalifaciens, Providencia friedericiana, Providencia heimbachae, Providencia rettgeri, Providencia rustigianii, Providencia stuartii, Rahnella aquatilis, Salmonella abony, Salmonella arizonae, Salmonella bongori, Salmonella choleraesuis subsp. arizonae, Salmonella choleraesuis subsp. bongori, Salmonella choleraesuis subsp. cholereasuis, Salmonella choleraesuis subsp. diarizonae, Salmonella choleraesuis subsp. houtenae, Salmonella choleraesuis subsp. indica, Salmonella choleraesuis subsp. salamae, Salmonella daressalaam, Salmonella enterica subsp. houtenae, Salmonella enterica subsp. salamae, Salmonella enteritidis, Salmonella gallinarum, Salmonella heidelberg, Salmonella panama, Salmonella senftenberg, Salmonella typhimurium, Serratia entomophila, Serratia ficaria, Serratia fonticola, Serratia grimesii, Serratia liquefaciens, Serratia marcescens, Serratia marcescens subsp. marcescens, Serratia marinorubra, Serratia odorifera, Serratia plymouthensis, Serratia plymuthica, Serratia proteamaculans, Serratia proteamaculans subsp. quinovora, Serratia quinivorans, Serratia rubidaea, Shigella boydii, Shigella flexneri, Shigella paradysenteriae, Shigella sonnei, Tatumella ptyseos, Xenorhabdus beddingii, Xenorhabdus bovienii, Xenorhabdus luminescens, Xenorhabdus nematophila, Xenorhabdus nematophila subsp. beddingii, Xenorhabdus nematophila subsp. bovienii, Xenorhabdus nematophila subsp. poinarii or Xenorhabdus poinarii; Gordoniaceae such as the genera Gordonia, Skermania e.g. the species Gordonia aichiensis, Gordonia alkanivorans, Gordonia amarae, Gordonia amicalis, Gordonia bronchialis, Gordonia desulfuricans, Gordonia hirsuta, Gordonia hydrophobica, Gordonia namibiensis, Gordonia nitida, Gordonia paraffinivorans, Gordonia polyisoprenivorans, Gordonia rhizosphera, Gordonia rubripertincta, Gordonia sihwensis, Gordonia sinesedis, Gordonia sput, Gordonia terrae or Gordonia wesffafrca; Micrococcaceae such as the genera Micrococcus, Arthrobacter, Kocuria, Nesterenkonia, Renibacterium, Rothia, Stomatococcus e.g. the species Micrococcus agilis, Micrococcus antarcticus, Micrococcus halobius, Micrococcus kristinae, Micrococcus luteus, Micrococcus lylae, Micrococcus nishinomiyaensis, Micrococcus roseus, Micrococcus sedentarius, Micrococcus varians, Arthrobacter agilis, Arthrobacter albus, Arthrobacter atrocyaneus, Arthrobacter aurescens, Arthrobacter chlorophenolicus, Arthrobacter citreus, Arthrobacter creatinolyticus, Arthrobacter crystallopoietes, Arthrobacter cumminsii, Arthrobacter duodecadis, Arthrobacter flavescens, Arthrobacter flavus, Arthrobacter gandavensis, Arthrobacter globiformis, Arthrobacter histidinolovorans, Arthrobacter ilicis, Arthrobacter koreensis, Arthrobacter luteolus, Arthrobacter methylotrophus, Arthrobacter mysorens, Arthrobacter nasiphocae, Arthrobacter nicotianae, Arthrobacter nicotinovorans, Arthrobacter oxydans, Arthrobacter pascens, Arthrobacter picolinophilus, Arthrobacter polychromogenes, Arthrobacter protophormiae, Afthrobacter psychrolactophilus, Arthrobacter radiotolerans, Arthrobacter ramosus, Arthrobacter rhombi, Arthrobacter roseus, Arthrobacter siderocapsulatus, Arthrobacter simplex, Arthrobacter sulfonivorans, Arthrobacter sulfureus, Arthrobacter terregens, Arthrobacter tumescens, Arthrobacter uratoxydans, Arthrobacter ureafaciens, Arthrobacter variabilis, Arthrobacter viscosus, Arthrobacter woluwensis, Kocuria erythromyxa, Kocuria kristinae, Kocuria palustris, Kocuria polaris, Kocuria rhizophila, Kocuria rosea, Kocuria varians, Nesterenkonia halobia, Nesterenkonia lacusekhoensis, Renibacterium salmoninarum, Rothia amarae, Rothia dentocariosa, Rothia mucilaginosa, Rothia nasimurium or Stomatococcus mucilaginosus; Mycobacteriaceae such as the genera Mycobacterium e.g. the species Mycobacterium africanum, Mycobacterium agri, Mycobacterium aichiense, Mycobacterium alvei, Mycobacterium asiaticum, Mycobacterium aurum, Mycobacterium austroafricanum, Mycobacterium bohemicum, Mycobacterium botniense, Mycobacterium brumae, Mycobacterium chelonae subsp. abscessus, Mycobacterium chitae, Mycobacterium chlorophenolicum, Mycobacterium chubuense, Mycobacterium confluentis, Mycobacterium cookii, Mycobacterium diernhoferi, Mycobacteriumm doricum, Mycobacterium duvalii, Mycobacterium fallax, Mycobacterium farcinogenes, Mycobacterium flavescens, Mycobacterium frederiksbergense, Mycobacterium gadium, Mycobacterium gilvum, Mycobacterium gordonae, Mycobacterium hassiacum, Mycobacterium hibemiae, Mycobacterium hodleri, Mycobacterium holsaticum, Mycobacterium komossense, Mycobacterium lacus, Mycobacterium madagascariense, Mycobacterium mageritense, Mycobacterium montefiorense, Mycobacterium moriokaense, Mycobacterium murale, Mycobacterium neoaurum, Mycobacterium nonchromogenicum, Mycobacterium obuense, Mycobacterium palustre, Mycobacterium parafortuitum, Mycobacterium peregrinum, Mycobacterium phlei, Mycobacterium pinnipedii, Mycobacterium poriferae, Mycobacterium pulveris, Mycobacterium rhodesiae, Mycobacterium shottsii, Mycobacterium sphagni, Mycobacterium terrae, Adycobacterium thermoresistibile, Mycobacterium tokaiense, Mycobacterium triviale, Mycobacterium tusciae or Mycobacterium vanbaalenii; Nocardiaceae such as the genera Nocardia, Rhodococcus e.g. the species Nocardia abscessus, Nocardia africana, Nocardia amarae, Nocardia asteroides, Nocardia autotrophica, Alocardia beijingensis, Nocardia brasiliensis, Nocardia brevicatena, Nocardia caishijiensis, Nocardia calcarea, Nocardia carnea, Nocardia cellulans, Nocardia cerradoensis, Nocardia coeliaca, Nocardia corynebacterioides, Nocardia crassostreae, Nocardia cummidelens, Nocardia cyriacigeorgica, Nocardia farcinica, Nocardia flavorosea, Nocardia fluminea, Nocardia globerula, Nocardia hydrocarbonoxydans, Nocardia ignorata, Nocardia mediterranei, Nocardia nova, Nocardia orientalis, Nocardia otitidiscaviarum, Nocardia otitidiscaviarum, Nocardia paucivorans, Nocardia petrcleophila, Nocardia pinensis, Nocardia pseudobrasiliensis, Nocardia pseudovaccinii, Nocardia puris, Nocardia restricta, Nocardia rugosa, Nocardia salmonicida, Nocardia saturnea, Nocardia seriolae, Nocardia soli, Nocardia sulphurea, Nocardia transvalersis, Nocardia uniformis, Nocardia vaccinii, Nocardia veterana or Nocardia vinacea; Pseudomonaceae such as the genera Azomonas, Azotobacter, Cellvibrio, Chryseomon as, Flaviomonas, Lampropedia, Mesophilobacter, Morococcus, Oligella, Pseudomonas, Rhizobacter, Rugamonas, Serpens, Thermoleophilum, Xylophilus e.g. the species Azomonas agilis, Azomonas insignis, Azomonas macrocytogenes, Azotobacter agilis, Azotobacter agilis subsp. armeniae, Azotobacter armeniacus, Azotobacter beijerinckii, Azotobacter chroococcum, Azotobacter indicum, Azotobacter macrocytogenes, Azotobacter miscellum, Azotobacter nigricans subsp. nigricans, Azotobacter paspali, Azotobacter salinestris, Azotobacter sp., Azotobacter vinelandii, Flavimonas oryzihabitans, Mesophilobacter marinus, Oligella urethralis, Pseudomonas acidovorans, Pseudomonas aeruginosa, Pseudomonas agarici, Pseudomonas alcaligenes, Pseudomonas aminovorans, Pseudomonas amygdali, Pseudomonas andropogonis, Pseudomonas anguilliseptica, Pseudomonas antarctica, Pseudomonas antimicrobica, Pseudomonas antimycetica, Pseudomonas aptata, Pseudomonas arvilla, Pseudomonas asplenii, Pseudomonas atlantica, Pseudomonas atrofaciens, Pseudomonas aureofaciens, Pseudomonas avellanae, Pseudomonas azelaica, Pseudomonas azotocolligans, Pseudomonas balearica, Pseudomonas barkeri, Pseudomonas bathycetes, Pseudomonas beijerinckii, Pseudomonas brassicacearum, Pseudomonas brenneri, Pseudomonas butanovora, Pseudomonas carboxydoflava, Pseudomonas carboxydohydrogena, Pseudomonas carboxydovorans, Pseudomonas carrageenovora, Pseudomonas caryophylli, Pseudomonas cepacia, Pseudomonas chloritidismutans, Pseudomonas chlororaphis, Pseudomonas cichorii, Pseudomonas citronellolis, Pseudomonas cocovenenans, Pseudomonas compransoris, Pseudomonas congrelans, Pseudomonas coronafaciens, Pseudomonas corrugate, Pseudomonas dacunhae, Pseudomonas delafieldii, Pseudomonas delphinii, Pseudomonas denitrificans, Pseudomonas desmolytica, Pseudomonas diminuta, Pseudomonas doudoroffii, Pseudomonas echinoides, Pseudomonas elongata, Pseudomonas extorquens, Pseudomonas extremorientalis, Pseudomonas facilis, Pseudomonas ficuserectae, Pseudomonas flava, Pseudomonas flavescens, Pseudomonas fluorescens, Pseudomonas fragi, Pseudomonas frederiksbergensis, Pseudomonas fulgida, Pseudomonas fuscovaginae, Pseudomonas gazotropha, Pseudomonas gladioli, Pseudomonas glathei, Pseudomonas glumae, Pseudomonas graminis, Pseudomonas halophila, Pseudomonas helianthi, Pseudomonas huttiensis, Pseudomonas hydrogenothermophila, Pseudommonas hydrogenovora, Pseudomonas indica, Pseudomonas indigofera, Pseudomonas iodinum, Pseudomonas kilonensis, Pseudomonas lachrymans, Pseudomonas lapsa, Pseudomonas lemoignei, Pseudomonas lemonnieri, Pseudomonas lundensis, Pseudomonas luteola, Pseudomonas maltophilia, Pseudomonas marginalis, Pseudomonas marginata, Pseudomonas marina, Pseudomonas meliae, Pseudomonas men docina, Pseudomonas mesophilica, Pseudomonas mixta, Pseudomonas monteilii, Pseudomonas morsprunorum, Pseudomonas multivorans, Pseudomonas natriegens, Pseudomonas neutica, Pseudomonas nitroreducens, Pseudomonas oleovorans, Pseudomonas oryzihabitans, Pseudomonas ovalis, Pseudomonas oxalaticus, Pseudomonas paeleronii, Pseudomonas paucimobilis, Pseudomonas phaseolicola, Pseudomonas phenazinium, Pseudomonas pickettii, Pseudomonas pisi, Pseudornonas plantari, Pseudomonas plecoglossicida, Pseudomonas poae, Pseudomonas primulae, Pseudomonas proteolytica, Pseudomonas pseudoalcaligenes, Pseudomonas pseudoalcaligenes subsp. konjaci, Pseudomonas pseudoalcaligenes subsp. pseudoalcaligenes, Pseudomonas pseudoflava, Pseudomonas putida, Pseudomonas putida var. naraensis, Pseudomonas putrefaciens, Pseudomonas pyrrocinia, Pseudomonas radiora, Pseudomonas reptilivora, Pseudomonas rhodesiae, Pseudomonas rhodos, Pseudomonas riboflavina, Pseudomonas rubescens, Pseudomonas rubrisubalbicans, Pseudomonas ruhlandii, Pseudomonas saccharophila, Pseudomonas savastanoi, Pseudomonas savastanoi pvar. glycinea, Pseudomonas savastanoi pvar. phaseolicola, Pseudomonas solanacearum, Pseudomonas sp., Pseudomonas spinosa, Pseudomonas stanieri, Pseudomonas stutzeri, Pseudomonas syringae, Pseudomonas syringae pvar. aptata, Pseudomonas syringae pvar. atrofaciens, Pseudomonas syringae pvar. coronafaciens, Pseudomonas syringae pvar. delphinii, Pseudomonas syringae pvar. glycinea, Pseudomonas syringae pvar. helianthi, Pseudomonas syringae pvar. lachrymans, Pseudomonas syringae pvar. lapsa, Pseudomonas syringae pvar. morsprunorum, Pseudomonas syringae pvar. phaseolicola, Pseudomonas syringae pvar. primulae, Pseudomonas syringae pvar. syringae, Pseudomonas syringae pvar. tabaci, Pseudomonas syringae pvar. tomato, Pseudomonas syringae subsp. glycinea, Pseudomonas syringae subsp. savastanoi, Pseudornonas syringae subsp. syringae, Pseudomonas syzygii, Pseudomonas tabaci, Pseudomonas taeniospiralis, Pseudomonas testosteroni, Pseudomonas thermocarboxydovorans, Pseudomonas thermotolerans, Pseudomonas thivervalensis, Pseudomonas tomato, Pseudomonas trivialis, Pseudomonas veronii, Pseudomonas vesicularis, Psetidomonas viridiflava, Pseudomonas viscogena, Pseudomonas woodsii, Rhizobacter dauci, Rhizobacter daucus or Xylophilus ampelinus; Rhizobiaceae such as the genera Agrobacterium, Carbophilus, Chelatobacter, Ensifer, Rhizobium, Sinorhizobium e.g. the species Agrobacterium atlanticum, Agrobacterium ferrugineum, Agrobacterium gelatinovorum, Agrobacterium larrymoorei, Agrobacterium meteori, Agrobacterium radiobacter, Agrobacterium rhizogenes, Agrobacterium rubi, Agrobacteriurn stellulatum, Agrobacterium tumefaciens, Agrobacterium vitis, Carbophilus carboxidus, Chelatobacter heintzii, Ensifer adhaerens, Ensifer arboris, Ensifer fredii, Ensifer kostiensis, Ensifer kummerowiae, Ensifer medicae, Ensifer meliloti, Ensifer saheli, Ensifer terangae, Ensifer xinjiangensis, Rhizobium ciceri Rhizobium etli, Rhizobium fredii, Rhizobium galegae, Rhizobium gallicum, Rhizobium giardinii, Rhizobium hainanense, Rhizobium huakuii, Rhizobium huautlense, Rhizobium indigoferae, Rhizobium japonicum, Rhizobium leguminosarum, Rhizobium loessense, Rhizobium loti, Rhizobium lupini, Rhizobium mediterraneum, Rhizobium meliloti, Rhizobium mongolense, Rhizobium phaseoli, Rhizobium radiobacter, Rhizobium rhizogenes, Rhizobium rubi, Rhizobium sullae, Rhizobium tianshanense, Rhizobium trifolii, Rhizobium tropici, Rhizobium undicola, Rhizobium vitis, Sinorhizobium adhaerens, Sinorhizobium arboris, Sinorhizobium fredii, Sinorhizobium kostiense, Sinorhizobium kummerowiae, Sinorhizobium medicae, Sinorhizobium meliloti, Sinorhizobium morelense, Sinorhizobium saheli or Sinorhizobium xinjiangense; Streptomycetaceae such as the genera Kitasatosprora, Streptomyces, Streptoverticillium e.g. the species Streptomyces abikoensis, Streptomyces aburaviensis, Streptomyces achromogenes subsp. achromogenes, Streptomyces achromogenes subsp. rubradiris, Streptomyces acidiscabies, Streptomyces acrimycini, Streptomyces aculeolatus, Streptomyces afghaniensis, Streptomyces alanosinicus, Streptomyces albaduncus, Streptomyces albiaxialis, Streptomyces albidochromogenes, Streptomyces albidoflavus, Streptomyces albireticuli, Streptomyces albofaciens, Streptomyces alboflavus, Streptomyces albogriseolus, Streptomyces albolongus, Streptomyces alboniger, Streptomyces albospinus, Streptomyces albosporeus subsp. albosporeus, Streptomyces albosporeus subsp. labilomyceticus, Streptomyces alboverticillatus, Streptomyces albovinaceus, Streptomyces alboviridis, Streptomyces albulus, Streptomyces albus subsp. albus, Streptomyces albus subsp. pathocidicus, Streptomyces almquistii, Streptomyces althioticus, Streptomyces amakusaensis, Streptomyces ambofaciens, Streptomyces aminophilus, Streptomyces anandii, Streptomyces anthocyanicus, Streptomyces antibioticus, Streptomyces antimycoticus, Streptomyces anulatus, Streptomyces arabicus, Streptomyces ardus, Streptomyces arenae, Streptomyces argenteolus, Streptomyces armeniacus, Streptomyces asiaticus, Streptomyces asterosporus, Streptomyces atratus, Streptomyces atroaurantiacus, Streptomyces atroolivaceus, Streptomyces atrovirens, Streptomyces aurantiacus, Streptomyces aurantiogriseus, Streptomyces aureocirculatus, Streptomyces aureofaciens, Streptomyces aureorectus, Streptomyces aureoversilis, Streptomyces aureoverticillatus, Streptomyces aureus, Streptomyces avellaneus, Streptomyces avermectinius, Streptomyces avermitilis, Streptomyces avidinii, Streptomyces azaticus, Streptomyces azureus, Streptomyces baarnensis, Streptomyces bacillaris, Streptomyces badius, Streptomyces baldaccii, Streptomyces bambergiensis, Streptomyces beijiangensis, Streptomyces bellus, Streptomyces bikiniensis, Streptomyces biverticillatus, Streptomyces blastmyceticus, Streptomyces bluensis, Streptomyces bobili, Streptomyces bottropensis, Streptomyces brasiliensis, Streptomyces bungoensis, Streptomyces cacaoi subsp. asoensis, Streptomyces cacaoi subsp. cacaoi, Streptomyces caelestis, Streptomyces caeruleus, Streptomyces californicus, Streptomyces calvus, Streptomyces canaries, Streptomyces candidus, Streptomyces canescens, Streptomyces cangkringensis, Streptomyces caniferus, Streptomyces canus, Streptomyces capillispiralis, Streptomyces capoamus, Streptomyces carpaticus, Streptomyces carpinensis, Streptomyces catenulae, Streptomyces caviscabies, Streptomyces cavourensis subsp. cavourensis, Streptomyces cavourensis subsp. washingtonensis, Streptomyces cellostaticus, Streptomyces celluloflavus, Streptomyces cellulolyticus, Streptomyces cellulosae, Streptomyces champavatii, Streptomyces chartreuses, Streptomyces chattanoogensis, Streptomyces chibaensis, Streptomyces chrestomyceticus, Streptomyces chromofuscus, Streptomyces chryseus, Streptomyces chrysomallus subsp. chrysomallus, Streptomyces chrysomallus subsp. fumigatus, Streptomyces cinereorectus, Streptomyces cinereoruber subsp. cinereoruber, Streptomyces cinereoruber subsp. fructofermentans, Streptomyces cinereospinus, Streptomyces cinereus, Streptomyces cinerochromogenes, Streptomyces cinnabarinus, Streptomyces cinnamonensis, Streptomyces cinnamoneus, Streptomyces cinnamoneus subsp. albosporus, Streptomyces cinnamoneus subsp. cinnamoneus, Streptomyces cinnamoneus subsp. lanosus, Streptomyces cinnamoneus subsp. sparsus, Streptomyces cirratus, Streptomyces ciscaucasicus, Streptomyces citreofluorescens, Streptomyces clavifer, Streptomyces clavuligerus, Streptomyces cochleatus, Streptomyces coelescens, Streptomyces coelicoflavus, Streptomyces coelicolor, Streptomyces coeruleoflavus, Streptomyces coeruleofuscus, Streptomyces coeruleoprunus, Streptomyces coeruleorubidus, Streptomyces coerulescens, Streptomyces collinus, Streptomyces colombiensis, Streptomyces corchorusii, Streptomyces costaricanus, Streptomyces cremeus, Streptomyces crystallinus, Streptomyces curacoi, Streptomyces cuspidosporus, Streptomyces cyaneofuscatus, Streptomyces cyaneus, Streptomyces cyanoalbus, Streptomyces cystargineus, Streptomyces daghestanicus, Streptomyces diastaticus subsp. ardesiacus, Streptomyces diastaticus subsp. diastaticus, Streptomyces diastatochromogenes, Streptomyces distallicus, Streptomyces djakartensis, Streptomyces durhamensis, Streptomyces echinatus, Streptomyces echinoruber, Streptomyces ederensis, Streptomyces ehimensis, Streptomyces endus, Streptomyces enissocaesilis, Streptomyces erumpens, Streptomyces erythraeus, Streptomyces erythrogriseus, Streptomyces eurocidicus, Streptomyces europaeiscabiei, Streptomyces eurythermus, Streptomyces exfoliates, Streptomyces felleus, Streptomyces fervens, Streptomyces fervens subsp. fervens, Streptomyces fervens subsp. melrosporus, Streptomyces filamentosus, Streptomyces filipinensis, Streptomyces fimbriatus, Streptomyces fimicarius, Streptomyces finlayi, Streptomyces flaveolus, Streptomyces flaveus, Streptomyces flavidofuscus, Streptomyces flavidovirens, Streptomyces flaviscleroticus, Streptomyces flavofungini, Streptomyces flavofuscus, Streptomyces flavogriseus, Streptomyces flavopersicus, Streptomyces flavotricini, Streptomyces flavovariabilis, Streptomyces flavovirens, Streptomyces flavoviridis, Streptomyces flocculus, Streptomyces floridae, Streptomyces fluorescens, Streptomyces fradiae, Streptomyces fragilis, Streptomyces fulvissimus, Streptomyces fulvorobeus, Streptomyces fumanus, Streptomyces fumigatiscleroticus, Streptomyces galbus, Streptomyces galilaeus, Streptomyces gancidicus, Streptomyces gardneri, Streptomyces gelaticus, Streptomyces geysiriensis, Streptomyces ghanaensis, Streptomyces gibsonii, Streptomyces glaucescens, Streptomyces glaucosporus, Streptomyces glaucus, Streptomyces globisporus subsp. caucasicus, Streptomyces globisporus subsp. flavofuscus, Streptomyces globisporus subsp. globisporus, Streptomyces globosus, Streptomyces glomeratus, Streptomyces glomeroaurantiacus, Streptomyces gobitricini, Streptomyces goshikiensis, Streptomyces gougerotii, Streptomyces graminearus, Streptomyces graminofaciens, Streptomyces griseinus, Streptomyces griseoaurantiacus, Streptomyces griseobrunneus, Streptomyces griseocarneus, Streptomyces griseochromogenes, Streptomyces griseoflavus, Streptomyces griseofuscus, Streptomyces griseoincamatus, Streptomyces griseoloalbus, Streptomyces griseolosporeus, Streptomyces griseolus, Streptomyces griseoluteus, Streptomyces griseomycini, Streptomyces griseoplanus, Streptomyces griseorubens, Streptomyces griseoruber, Streptomyces griseorubiginosus, Streptomyces griseosporeus, Streptomyces griseostramineus, Streptomyces griseoverticillatus, Streptomyces griseoviridis, Streptomyces griseus subsp. alpha, Streptomyces griseus subsp. cretosus, Streptomyces griseus subsp. griseus, Streptomyces griseus subsp. solvifaciens, Streptomyces hachijoensis, Streptomyces halstedii, Streptomyces hawaiiensis, Streptomyces heliomycini, Streptomyces helvaticus, Streptomyces herbaricolor, Streptomyces hiroshimensis, Streptomyces hirsutus, Streptomyces humidus, Streptomyces humiferus, Streptomyces hydrogenans, Streptomyces hygroscopicus subsp. angustmyceticus, Streptomyces hygroscopicus subsp. decoyicus, Streptomyces hygroscopicus subsp. glebosus, Streptomyces hygroscopicus subsp. hygroscopicus, Streptomyces hygroscopicus subsp. ossamyceticus, Streptomyces iakyrus, Streptomyces indiaensis, Streptomyces indigoferus, Streptomyces indonesiensis, Streptomyces intermedius, Streptomyces inusitatus, Streptomyces ipomoeae, Streptomyces janthinus, Streptomyces javensis, Streptomyces kanamyceticus, Streptomyces kashmirensis, Streptomyces kasugaensis, Streptomyces katrae, Streptomyces kentuckensis, Streptomyces kifunensis, Streptomyces kishiwadensis, Streptomyces kunmingensis, Streptomyces kurssanovii, Streptomyces labedae, Streptomyces laceyi, Streptomyces ladakanum, Streptomyces lanatus, Streptomyces lateritius, Streptomyces laurentii, Streptomyces lavendofoliae, Streptomyces lavendulae subsp. grasserius, Streptomyces lavendulae subsp. lavendulae, Streptomyces lavenduligriseus, Streptomyces lavendulocolor, Streptomyces levis, Streptomyces libani subsp. libani, Streptomyces libani subsp. rufus, Streptomyces lienomycini, Streptomyces ilacinus, Streptomyces limosus, Streptomyces lincolnensis, Streptomyces lipmanii, Streptomyces litmocidini, Streptomyces lomondensis, Streptomyces longisporoflavus, Streptomyces longispororuber, Streptomyces longisporus, Streptomyces longwoodensis, Streptomyces lucensis, Streptomyces luridiscabiei, Streptomyces luridus, Streptomyces lusitanus, Streptomyces luteireticuli, Streptomyces luteogriseus, Streptomyces luteosporeus, Streptomyces luteoverticillatus, Streptomyces lydicus, Streptomyces macrosporus, Streptomyces malachitofuscus, Streptomyces malachitospinus, Streptomyces malaysiensis, Streptomyces mashuensis, Streptomyces massasporeus, Streptomyces matensis, Streptomyces mauvecolor, Streptomyces mediocidicus, Streptomyces mediolani, Streptomyces megasporus, Streptomyces melanogenes, Streptomyces melanosporofaciens, Streptomyces mexicanus, Streptomyces michiganensis, Streptomyces microflavus, Streptomyces minutiscleroticus, Streptomyces mirabilis, Streptomyces misakiensis, Streptomyces misionensis, Streptomyces mobaraensis, Streptomyces monomycini, Streptomyces morookaensis, Streptomyces murinus, Streptomyces mutabilis, Streptomyces mutomycini, Streptomyces naganishii, Streptomyces narbonensis, Streptomyces nashvillensis, Streptomyces netropsis, Streptomyces neyagawaensis, Streptomyces niger, Streptomyces nigrescens, Streptomyces nigrifaciens, Streptomyces nitrosporeus, Streptomyces niveiciscabiei, Streptomyces niveoruber, Streptomyces niveus, Streptomyces noboritoensis, Streptomyces nodosus, Streptomyces nogalater, Streptomyces nojiriensis, Streptomyces noursei, Streptomyces novaecaesareae, Streptomyces ochraceiscleroticus, Streptomyces odorifer, Streptomyces olivaceiscleroticus, Streptomyces olivaceoviridis, Streptomyces olivaceus, Streptomyces olivochromogenes, Streptomyces olivomycini, Streptomyces olivoreticuli, Streptomyces olivoreticuli subsp. cellulophilus, Streptomyces olivoreticuli subsp. olivoreticuli, Streptomyces olivoverticillatus, Streptomyces olivoviridis, Streptomyces omiyaensis, Streptomyces orinoci, Streptomyces pactum, Streptomyces paracochleatus, Streptomyces paradoxus, Streptomyces parvisporogenes, Streptomyces parvulus, Streptomyces parvus, Streptomyces peucetius, Streptomyces phaeochromogenes, Streptomyces phaeofaciens, Streptomyces phaeopurpureus, Streptomyces phaeoviridis, Streptomyces phosalacineus, Streptomyces pilosus, Streptomyces platensis, Streptomyces plicatus, Streptomyces pluricolorescens, Streptomyces polychromogenes, Streptomyces poonensis, Streptomyces praecox, Streptomyces prasinopilosus, Streptomyces prasinosporus, Streptomyces prasinus, Streptomyces prunicolor, Streptomyces psammoticus, Streptomyces pseudoechinosporeus, Streptomyces pseudogriseolus, Streptomyces pseudovenezuelae, Streptomyces pulveraceus, Streptomyces puniceus, Streptomyces puniciscabiei, Streptomyces purpeofuscus, Streptomyces purpurascens, Streptomyces purpureus, Streptomyces purpurogeneiscleroticus, Streptomyces racemochromogenes, Streptomyces rameus, Streptomyces ramulosus, Streptomyces rangoonensis, Streptomyces recifensis, Streptomyces rectiverticillatus, Streptomyces rectiviolaceus, Streptomyces regensis, Streptomyces resistomycificus, Streptomyces reticuliscabiei, Streptomyces rhizosphaericus, Streptomyces rimosus subsp. paromomycinus, Streptomyces rimosus subsp. rimosus, Streptomyces rishiriensis, Streptomyces rochei, Streptomyces roseiscleroticus, Streptomyces roseodiastaticus, Streptomyces roseoflavus, Streptomyces roseofulvus, Streptomyces roseolilacinus, Streptomyces roseolus, Streptomyces roseosporus, Streptomyces roseoverticillatus, Streptomyces roseoviolaceus, Streptomyces roseoviridis, Streptomyces rubber, Streptomyces rubiginosohelvolus, Streptomyces rubiginosus, Streptomyces rubrogriseus, Streptomyces rutgersensis subsp. castelarensis, Streptomyces rutgersensis subsp. rutgersensis, Streptomyces salmonis, Streptomyces sampsonii, Streptomyces sanglieri, Streptomyces sannanensis, Streptomyces sapporonensis, Streptomyces scabiei, Streptomyces sclerotialus, Streptomyces scopiformis, Streptomyces seoulensis, Streptomyces septatus, Streptomyces setae, Streptomyces setonii, Streptomyces showdoensis, Streptomyces sindenensis, Streptomyces sioyaensis, Streptomyces somaliensis, Streptomyces sparsogenes, Streptomyces spectabilis, Streptomyces speibonae, Streptomyces speleomycini, Streptomyces spheroids, Streptomyces spinoverrucosus, Streptomyces spiralis, Streptomyces spiroverticillatus, Streptomyces spitsbergensis, Streptomyces sporocinereus, Streptomyces sporoclivatus, Streptomyces spororaveus, Streptomyces sporoverrucosus, Streptomyces stelliscabiei, Streptomyces stramineus, Streptomyces subrutilus, Streptomyces sulfonofaciens, Streptomyces sulphurous, Streptomyces syringium, Streptomyces tanashiensis, Streptomyces tauricus, Streptomyces tendae, Streptomyces termitum, Streptomyces thermoalcalitolerans, Streptomyces thermoautotrophicus, Streptomyces thermocarboxydovorans, Streptomyces thermocarboxydus, Streptomyces thermocoprophilus, Streptomyces thermodiastaticus, Streptomyces thermogriseus, Streptomyces thermolineatus, Streptomyces thermonitrificans, Streptomyces thermospinosisporus, Streptomyces thermoviolaceus subsp. apingens, Streptomyces thermoviolaceus subsp. thermoviolaceus, Streptomyces thermovulgaris, Streptomyces thioluteus, Streptomyces torulosus, Streptomyces toxytricini, Streptomyces tricolor, Streptomyces tubercidicus, Streptomyces tuirus, Streptomyces turgidiscabies, Streptomyces umbrinus, Streptomyces variabilis, Streptomyces variegates, Streptomyces varsoviensis, Streptomyces vastus, Streptomyces venezuelae, Streptomyces vinaceus, Streptomyces vinaceusdrappus, Streptomyces violaceochromogenes, Streptomyces violaceolatus, Streptomyces violaceorectus, Streptomyces violaceoruber, Streptomyces violaceorubidus, Streptomyces violaceus, Streptomyces violaceusniger, Streptomyces violarus, Streptomyces violascens, Streptomyces violatus, Streptomyces violens, Streptomyces virens, Streptomyces virginiae, Streptomyces viridiflavus, Streptomyces viridiviolaceus, Streptomyces viridobrunneus, Streptomyces viridochromogenes, Streptomyces viridodiastaticus, Streptomyces viridosporus, Streptomyces vitaminophileus, Streptomyces vitaminophilus, Streptomyces wedmorensis, Streptomyces werraensis, Streptomyces willmorei, Streptomyces xanthochromogenes, Streptomyces xanthocidicus, Streptomyces xantholiticus, Streptomyces xanthophaeus, Streptomyces yatensis, Streptomyces yerevanensis, Streptomyces yogyakartensis, Streptomyces yokosukanensis, Streptomyces yunnanensis, Streptomyces zaomyceticus, Streptoverticillium abikoense, Streptoverticillium albireticuli, Streptoverticillium alboverticillatum, Streptoverticillium album, Streptoverticillium ardum, Streptoverticillium aureoversale, Streptoverticillium aureoversile, Streptoverticillium baldaccii, Streptoverticillium biverticillatum, Streptoverticillium blastmyceticum, Streptoverticillium cinnamoneum subsp. albosporum, Streptomyces cinnamoneus subsp. albosporus, Streptoverticillium cinnamoneum subsp. cinnamoneum, Streptoverticillium cinnamoneum subsp. lanosum, Streptoverticillium cinnamoneum subsp. sparsum, Streptoverticillium distallicum, Streptoverticillium ehimense, Streptoverticillium eurocidicum, Streptoverticillium fervens subsp. fervens, Streptoverticillium fervens subsp. melrosporus, Streptoverticillium flavopersiclim, Streptoverticillium griseocarneum, Streptoverticillium griseoverticillatum, Streptoverticillium hachijoense, Streptoverticillium hiroshimense, Streptoverticillium kashmirense, Streptoverticillium kentuckense, Streptoverticillium kishiwadense, Streptoverticillium ladakanum, Streptoverticillium lavenduligriseum, Streptoverticillium lilacinum, Streptoverticillium luteoverticillatum, Streptoverticillium mashuense, Streptoverticillium mobaraense, Streptoverticillium morookaense, Streptoverticillium netropsis, Streptoverticillium olivomycini, Streptomyces olivomycini, Streptoverticillium olivoreticuli subsp. cellulophilum, Streptoverticillium olivoreticuli subsp. olivoreticuli, Streptoverticillium olivoreticulum, Streptoverticillium olivoreticulum subsp. cellulophilum, Streptoverticillium olivoverticillatum, Streptoverticillium orinoci, Streptoverticillium parvisporogenes, Streptoverticillium parvisporogenum, Streptoverticillium rectiverticillatum, Streptoverticillium reticulum subsp. protomycicum, Streptoverticillium roseoverticillatum, Streptoverticillium salmonis, Streptoverticillium sapporonense, Streptoverticillium septatum, Streptoverticillium syringium, Streptoverticillium thioluteum, Streptoverticillium verticillium subsp. quantum, Streptoverticillium verticillium subsp. tsukushiense or Streptoverticillium viridoflavum.

[0182] Particular preferred strains are strains selected from the group consisting of Bacillaceae, Brevibacteriaceae, Corynebacteriaceae, Nocardiaceae, Mycobacteriaceae, Streptomycetaceae, Enterobacteriaceae such as Bacillus circulans, Bacillus subtilis, Bacillus sp., Brevibacterium albidum, Brevibacterium album, Brevibacterium cerinum, Brevibacterium flavum, Brevibacterium glutamigenes, Brevibacterium iodinum, Brevibacterium ketoglutamicum, Brevibacterium lactofermentum, Brevibacterium linens, Brevibacterium roseum, Brevibacterium saccharolyticum, Brevibacterium sp., Corynebacterium acetoacidophilum, Corynebacterium acetoglutamicum, Corynebacterium ammoniagenes, Corynebacterium glutamicum (=Micrococcus glutamicum), Corynebacterium melassecola, Corynebacterium sp., Nocardia rhodochrous (Rhodococcus rhodochrous), Mycobacterium rhodochrous, Streptomyces lividans and Escherichia coli especially Escherichia coli K12.

[0183] In addition particular preferred strains are strains selected from the group consisting of Cryptococcaceae, Saccharomycetaceae, Schizosaccharomycetacease such as the genera Candida, Hansenula, Pichia, Saccharomyces and Schizosaccharomyces preferred are strains selected from the group consisting of the species Rhodotorula rubra, Rhodotorula glutinis, Rhodotorula graminis, Yarrowia lipolytica, Sporobolomyces salmonicolor, Sporobolomyces shibatanus, Saccharomyces cerevisiae, Candida boidinii, Candida bombicola, Candida cylindracea, Candida parapsilosis, Candida rugosa, Candida tropicalis, Pichia methanolica and Pichia pastoris. All abovementioned host organisms are also useable as source organisms for the nucleic acid sequences of the invention. Cryptococcaceae, Saccharomycetaceae, Schizosaccharomycetacease such as the genera Candida, Hansenula, Pichia, Saccharomyces and Schizosaccharomyces are preferred source organisms.

[0184] In the event that the transgenic host organism is a non-human animal such as Caenorhaditis elegans or a plant, plant tissue or plant cell such as plants selected from the group consisting of the families Anacardiaceae, Asteraceae, Apiaceae, Betulaceae, Boraginaceae, Brassicaceae, Bromeliaceae, Caricaceae, Cannabaceae, Convolvulaceae, Chenopodiaceae, Cucurbitaceae, Elaeagnaceae, Ericaceae, Euphorbiaceae, Fabaceae, Geraniaceae, Gramineae, Juglandaceae, Lauraceae, Leguminosae, Linaceae or perennial grass, fodder crops, vegetables, ornamentals and Arabidopsis thaliana. Such plants are either grown on a solid medium or as cells in a liquid medium, which is known to the skilled worker and suits the organism. Furthermore such plants can be grown in soil or therelike. After the growing phase, the organisms can be harvested. The plants or plant cells or the recovered, and if desired isolated, amino acids can then be processed further directly into foodstuffs or animal feeds or for other applications, for example according to the disclosures made in EP-B-0 533 039 or EP-A-0 615 693, which are expressly incorporated herein by reference. The harvested material can be purified in the customary manner by extraction and precipitation or via ion exchangers and other methods known to the person skilled in the art and described herein below. Products of these different workup procedures are plants or plant material containing the desired amino acids or amino acid compositions which still comprise parts of the plants and/or cell components in different amounts, advantageously in the range of from 0 to 99% by weight, preferably below 80% by weight, especially preferably between below 50% by weight.

[0185] Anacardiaceae such as the genera Pistacia, Mangifera, Anacardium e.g. the species Pistacia vera [pistachios, Pistazie], Mangifer indica [Mango] or Anacardium occidentale [Cashew]; Asteraceae such as the genera Calendula, Carthamus, Centaurea, Cichorium, Cynara, Helianthus, Lactuca, Locusta, Tagetes, Valeriana e.g. the species Calendula officinalis [Marigold], Carthamus tinctorius [safflower], Centaurea cyanus [cornflower], Cichorium intybus [blue daisy], Cynara scolymus [Artichoke], Helianthus annus [sunflower], Lactuca sativa, Lactuca crispa, Lactuca esculenta, Lactuca scariola L. ssp. sativa, Lactuca scariola L. var. integrata, Lactuca scariola L. var. integrifolia, Lactuca sativa subsp. romana, Locusta communis, Valeriana locusta [lettuce], Tagetes lucida, Tagetes erecta or Tagetes tenuifolia [Marigold]; Apiaceae such as the genera Daucus e.g. the species Daucus carota [carrot]; Betulaceae such as the genera Corylus e.g. the species Corylus avellana or Corylus colurna [hazelnut]; Boraginaceae such as the genera Borago e.g. the species Borago officinalis [borage]; Brassicaceae such as the genera Brassica, Melanosinapis, Sinapis, Arabidopsis e.g. the species Brassica napus, Brassica rapa ssp. [canola, oilseed rape, turnip rape], Sinapis arvensis Brassicajuncea, Brassicajuncea var. juncea, Brassica juncea var. crispifolia, Brassica juncea var. foliosa, Brassica nigra, Brassica sinapioides, Melanosinapis communis [mustard], Brassica oleracea [fodder beet] or Arabidopsis thaliana; Bromeliaceae such as the genera Anana, Bromelia e.g. the species Anana comosus, Ananas ananas or Bromelia comosa [pineapple]; Caricaceae such as the genera Carica e.g. the species Carica papaya [papaya]; Cannabaceae such as the genera Cannabis e.g. the species Cannabis sative [hemp], Convolvulaceae such as the genera Ipomea, Convolvulus e.g. the species Ipomoea batatus, Ipomoea pandurata, Convolvulus batatas, Convolvulus tiliaceus, Ipomoea fastigiata, Ipomoea tiliacea, Ipomoea triloba or Convolvulus panduratus [sweet potato, Man of the Earth, wild potato], Chenopodiaceae such as the genera Beta, i.e. the species Beta vulgaris, Beta vulgaris var. altissima, Beta vulgaris var. Vulgaris, Beta maritima, Beta vulgaris var. perennis, Beta vulgaris var. conditiva or Beta vulgaris var. esculenta [sugar beet]; Cucurbitaceae such as the genera Cucubita e.g. the species Cucurbita maxima, Cucurbita mixta, Cucurbita pepo or Cucurbita moschata [pumpkin, squash]; Elaeagnaceae such as the genera Elaeagnus e.g. the species Olea europaea [olive]; Ericaceae such as the genera Kalmia e.g. the species Kalmia latifolia, Kalmia angustifolia, Kalmia microphylla, Kalmia polifolia, Kalmia occidentalis, Cistus chamaerhodendros or Kalmia lucida [American laurel, broad-leafed laurel, calico bush, spoon wood, sheep laurel, alpine laurel, bog laurel, western bog-laurel, swamp-laurel]; Euphorbiaceae such as the genera Manihot, Janipha, Jatropha, Ricinus e.g. the species Manihot utilissima, Janipha manihot, Jatropha manihot, Manihot aipil, Manihot dulcis, Manihot manihot, Manihot melanobasis, Manihot esculenta [manihot, arrowroot, tapioca, cassaya] or Ricinus communis [castor bean, Castor Oil Bush, Castor Oil Plant, Palma Christi, Wonder Tree]; Fabaceae such as the genera Pisum, Albizia, Cathormion, Feuillea, Inga, Pithecolobium, Acacia, Mimosa, Medicajo, Glycine, Dolichos, Phaseolus, Soja e.g. the species Pisum sativum, Pisum arvense, Pisum humile [pea], Albizia berteriana, Albizia julibrissin, Albizia lebbeck, Acacia berteriana, Acacia littoralis, Albizia berteriana, Albizzia berteriana, Cathormion berteriana, Feuillea berteriana, Inga fragrans, Pithecellobium berterianum, Pithecellobium fragrans, Pithecolobium berterianum, Pseudalbizzia berteriana, Acacia julibrissin, Acacia nemu, Albizia nemu, Feuilleea julibrissin, Mimosa julibrissin, Mimosa speciosa, Sericanrda julibrissin, Acacia lebbeck, Acacia macrophylla, Albizia lebbek, Feuilleea lebbeck, Mimosa lebbeck, Mimosa speciosa [bastard logwood, silk tree, East Indian Walnut], Medicago sativa, Medicago falcata, Medicago varia [alfalfa] Glycine max Dolichos soja, Glycine gracilis, Glycine hispida, Phaseolus max, Soja hispida or Soja max [soybean]; Geraniaceae such as the genera Pelargonium, Cocos, Oleum e.g. the species Cocos nucifera, Pelargonium grossularioides or Oleum cocois [coconut]; Gramineae such as the genera Saccharum e.g. the species Saccharum officinarum; Juglandaceae such as the genera Juglans, Wallia e.g. the species Juglans regia, Juglans ailanthifolia, Juglans sieboldiana, Juglans cinerea, Wallia cinerea, Juglans bixbyi, Juglans californica, Juglans hindsii, Juglans intermedia, Juglansjamaicensis, Juglans major, Juglans microcarpa, Juglans nigra or Wallia nigra [walnut, black walnut, common walnut, persian walnut, white walnut, butternut, black walnut]; Lauraceae such as the genera Persea, Laurus e.g. the species laurel Laurus nobilis [bay, laurel, bay laurel, sweet bay], Persea americana Persea americana, Persea gratissima or Persea persea [avocado]; Leguminosae such as the genera Arachis e.g. the species Arachis hypogaea [peanut]; Linaceae such as the genera Linum, Adenolinum e.g. the species Linum usitatissimum, Linum humile, Linum austriacum, Linum bienne, Linum angustifolium, Linum catharticum, Linum flavum, Linum grandiflorum, Adenolinum grandiflorum, Linum lewisii, Linum narbonense, Linum perenne, Linum perenne var. lewisii, Linum pratense or Linum trigynum [flax, linseed]; Lythrarieae such as the genera Punica e.g. the species Punica granatum [pomegranate]; Malvaceae such as the genera Gossypium e.g. the species Gossypium hirsutum, Gossypium arboreum, Gossypium barbadense, Gossypium herbaceum or Gossypium thurberi [cotton]; Musaceae such as the genera Musa e.g. the species Musa nana, Musa acuminata, Musa paradisiaca, Musa spp. [banana]; Onagraceae such as the genera Camissonia, Oenothera e.g. the species Oenothera biennis or Camissonia brevipes [primrose, evening primrose]; Palmae such as the genera Elacis e.g. the species Elaeis guineensis [oil plam]; Papaveraceae such as the genera Papaver e.g. the species Papaver orientale, Papaver rhoeas, Papaver dubium [poppy, oriental poppy, corn poppy, field poppy, shirley poppies, field poppy, long-headed poppy, long-pod poppy]; Pedaliaceae such as the genera Sesamum e.g. the species Sesamum indicum [sesame]; Piperaceae such as the genera Piper, Artanthe, Peperomia, Steffensia e.g. the species Piper aduncum, Piper amalago, Piper angustifolium, Piper auritum, Piper betel, Piper cubeba, Piper longum, Piper nigrum, Piper retrofractum, Artanthe adunca, Artanthe elongata, Peperomia elongata, Piper elongatum, Steffensia elongata. [Cayenne pepper, wild pepper]; Poaceae such as the genera Hordeum, Secale, Avena, Sorghum, Andropogon, Holcus, Panicum, Oryza, Zea, Triticum e.g. the species Hordeum vulgare, Hordeum jubatum, Hordeum murinum, Hordeum secalinum, Hordeum distichon Hordeum aegiceras, Hordeum hexastichon., Hordeum hexastichum, Hordeum irregulare, Hordeum sativum, Hordeum secalinum [barley, pearl barley, foxtail barley, wall barley, meadow barley], Secale cereale [rye], Avena sativa, Avena fatua, Avena byzantina, Avena fatua var. sativa, Avena hybrida [oat], Sorghum bicolor, Sorghum halepense, Sorghum saccharatum, Sorghum vulgare, Andropogon drummondi, Holcus bicolor, Holcus sorghum, Sorghum aethiopicum, Sorghum arundinaceum, Sorghum caffrorum, Sorghum cernuum, Sorghum dochna, Sorghum drummondi, Sorghum durra, Sorghum guineense, Sorghum lanceolatum, Sorghum nervosum, Sorghum saccharatum, Sorghum subglabrescens, Sorghum verticilliflorum, Sorghum vulgare, Holcus halepensis, Sorghum miliaceum millet, Panicum militaceum [Sorghum, millet], Oryza sativa, Oryza latifolia [rice], Zea mays [corn, maize] Triticum aestivum, Triticum durum, Triticum turgidum, Triticum hybernum, Triticum macha, Triticum sativum or Triticum vulgare [wheat, bread wheat, common wheat], Proteaceae such as the genera Macadamia e.g. the species Macadamia intergrifolia [macadamia]; Rubiaceae such as the genera Coffea e.g. the species Cofea spp., Coffea arabica, Coffea canephora or Coffea liberica [coffee]; Scrophulariaceae such as the genera Verbascum e.g. the species Verbascum blattaria, Verbascum chaixii, Verbascum densiflorum, Verbascum lagurus, Verbascum longifolium, Verbascum lychnitis, Verbascum nigrum, Verbascum olympicum, Verbascum phlomoides, Verbascum phoenicum, Verbascum pulverulentum or Verbascum thapsus [mullein, white moth mullein, nettle-leaved mullein, dense-flowered mullein, silver mullein, long-leaved mullein, white mullein, dark mullein, greek mullein, orange mullein, purple mullein, hoary mullein, great mullein]; Solanaceae such as the genera Capsicum, Nicotiana, Solanum, Lycopersicon e.g. the species Capsicum annuum, Capsicum annuum var. glabriusculum, Capsicum frutescens [pepper], Capsicum annuum [paprika], Nicotiana tabacum, Nicotiana alata, Nicotiana attenuate, Nicotiana glauca, Nicotiana langsdorffi, Nicotiana obtusifolia, Nicotiana quadrivalvis, Nicotiana repanda, Nicotiana rustica, Nicotiana sylvestris [tobacco], Solanum tuberosum [potato], Solanum melongena [egg-plant] (Lycopersicon esculentum, Lycopersicon lycopersicum., Lycopersicon pyriforme, Solanum integrifolium or Solanum lycopersicum [tomato]; Sterculiaceae such as the genera Theobroma e.g. the species Theobroma cacao [cacao]; Theaceae such as the genera Camellia e.g. the species Camellia sinensis) [tea]. All abovementioned host organisms are also useable as source organisms for the nucleic acid sequences of the invention.

[0186] Particular preferred plants are plants selected from the group consisting of maize, soja, canola, wheat, barley, triticale, rice, linseed, sunflower, potato and Arabidopsis.

[0187] With regard to the nucleic acid sequence as depicted in SEQ ID NO: 1, SEQ ID NO: 3, SEQ ID NO: 5, SEQ ID NO: 7, SEQ ID NO: 9, SEQ ID NO: 11, SEQ ID NO: 13, SEQ ID NO: 15, SEQ ID NO: 19, SEQ ID NO: 21, SEQ ID NO: 23, SEQ ID NO: 25, SEQ ID NO: 27, SEQ ID NO: 29, SEQ ID NO: 31; SEQ ID NO: 64, SEQ ID NO: 66, SEQ ID NO: 68, SEQ ID NO: 70, SEQ ID NO: 72, SEQ ID NO: 74, SEQ ID NO: 76, SEQ ID NO: 78, SEQ ID NO: 80, SEQ ID NO: 82, SEQ ID NO: 84, SEQ ID NO: 86, SEQ ID NO: 88, SEQ ID NO: 90, SEQ ID NO: 92, SEQ ID NO: 94, SEQ ID NO: 96, SEQ ID NO: 98, SEQ ID NO: 100, SEQ ID NO: 102, SEQ ID NO: 104, SEQ ID NO: 106, SEQ ID NO: 108, SEQ ID NO: 110, SEQ ID NO: 112, SEQ ID NO: 114, SEQ ID NO: 116, SEQ ID NO: 118, SEQ ID NO: 120, SEQ ID NO: 122, SEQ ID NO: 124, SEQ ID NO: 126, SEQ ID NO: 128, SEQ ID NO: 130, SEQ ID NO: 132, SEQ ID NO: 134, SEQ ID NO: 136, SEQ ID NO: 138, SEQ ID NO: 140, SEQ ID NO: , SEQ ID NO: 142, SEQ ID NO: 151, SEQ ID NO: 153, SEQ ID NO: 155, SEQ ID NO: 157, SEQ ID NO: 159, SEQ ID NO: 161, SEQ ID NO: 163, SEQ ID NO: 165, SEQ ID NO: 167, SEQ ID NO: 169, SEQ ID NO: 171, SEQ ID NO: 173, SEQ ID NO: 175, SEQ ID NO: 177, SEQ ID NO: 179, SEQ ID NO: 181, SEQ ID NO: 183, SEQ ID NO: 185, SEQ ID NO: 187, SEQ ID NO: 189, SEQ ID NO: 191, SEQ ID NO: 193, SEQ ID NO: 195, SEQ ID NO: 197, SEQ ID NO: 199, SEQ ID NO: 201, SEQ ID NO: 203, SEQ ID NO: 205, SEQ ID NO: 207, SEQ ID NO: 209, SEQ ID NO: 211, SEQ ID NO: 213, SEQ ID NO: 215, SEQ ID NO: 217, SEQ ID NO: 219, SEQ ID NO: 228, SEQ ID NO: 230, SEQ ID NO: 232, SEQ ID NO: 234, SEQ ID NO: 236, SEQ ID NO: 238, SEQ ID NO: 240, SEQ ID NO: 242, SEQ ID NO: 249, SEQ ID NO: 251, SEQ ID NO: 253, SEQ ID NO: 255, SEQ ID NO: 257, SEQ ID NO: 259, SEQ ID NO: 261, SEQ ID NO: 263, SEQ ID NO: 265, SEQ ID NO: 267, SEQ ID NO: 269, SEQ ID NO: 271, SEQ ID NO: 282, SEQ ID NO: 284, SEQ ID NO: 286, SEQ ID NO: 288, SEQ ID NO: 290, SEQ ID NO: 292, SEQ ID NO: 294, SEQ ID NO: 296, SEQ ID NO: 298, SEQ ID NO: 300, SEQ ID NO: 302, SEQ ID NO: 304, SEQ ID NO: 306, SEQ ID NO: 308, SEQ ID NO: 310, SEQ ID NO: 312, SEQ ID NO: 314, SEQ ID NO: 316, SEQ ID NO: 318, SEQ ID NO: 320, SEQ ID NO: 322, SEQ ID NO: 324, SEQ ID NO: 326, SEQ ID NO: 328, SEQ ID NO: 330, SEQ ID NO: 332, SEQ ID NO: 334, SEQ ID NO: 336, SEQ ID NO: 338, SEQ ID NO: 340, SEQ ID NO: 342, SEQ ID NO: 344, SEQ ID NO: 346, SEQ ID NO: 348, SEQ ID NO: 350, SEQ ID NO: 352, SEQ ID NO: 354, SEQ ID NO: 356, SEQ ID NO: 358, SEQ ID NO: 360, SEQ ID NO: 362, SEQ ID NO: 364, SEQ ID NO: 366, SEQ ID NO: 368, SEQ ID NO: 370, SEQ ID NO: 372, SEQ ID NO: 374, SEQ ID NO: 376, SEQ ID NO: 378, SEQ ID NO: 380, SEQ ID NO: 382, SEQ ID NO: 384, SEQ ID NO: 386, SEQ ID NO: 388, SEQ ID NO: 390, SEQ ID NO: 392, SEQ ID NO: 394, SEQ ID NO: 396, SEQ ID NO: 398, SEQ ID NO: 400, SEQ ID NO: 402, SEQ ID NO: 404, SEQ ID NO: 406, SEQ ID NO: 408, SEQ ID NO: 410, SEQ ID NO: 412, SEQ ID NO: 414, SEQ ID NO: 416, SEQ ID NO: 418, SEQ ID NO: 420, SEQ ID NO: 422, SEQ ID NO: 424, SEQ ID NO: 426, SEQ ID NO: 428, SEQ ID NO: 430, SEQ ID NO: 432, SEQ ID NO: 434 or SEQ ID NO: 440 a nucleic acid construct which contains said nucleic acid sequence or an organism (=transgenic organism) which is transformed with said nucleic acid sequence or said nucleic acid construct, “transgene” means all those constructs which have been brought about by genetic manipulation methods and in which either
[0188] a) the nucleic acid sequence as depicted in SEQ ID NO: 1, SEQ ID NO: 3, SEQ ID NO: 5, SEQ ID NO: 7, SEQ ID NO: 9, SEQ ID NO: 11, SEQ ID NO: 13, SEQ ID NO: 15, SEQ ID NO: 19, SEQ ID NO: 21, SEQ ID NO: 23, SEQ ID NO: 25, SEQ ID NO: 27, SEQ ID NO: 29, SEQ ID NO: 31; SEQ ID NO: 64, SEQ ID NO: 66, SEQ ID NO: 68, SEQ ID NO: 70, SEQ ID NO: 72, SEQ ID NO: 74, SEQ ID NO: 76, SEQ ID NO: 78, SEQ ID NO: 80, SEQ ID NO: 82, SEQ ID NO: 84, SEQ ID NO: 86, SEQ ID NO: 88, SEQ ID NO: 90, SEQ ID NO: 92, SEQ ID NO: 94, SEQ ID NO: 96, SEQ ID NO: 98, SEQ ID NO: 100, SEQ ID NO: 102, SEQ ID NO: 104, SEQ ID NO: 106, SEQ ID NO: 108, SEQ ID NO: 110, SEQ ID NO: 112, SEQ ID NO: 114, SEQ ID NO: 116, SEQ ID NO: 118, SEQ ID NO: 120, SEQ ID NO: 122, SEQ ID NO: 124, SEQ ID NO: 126, SEQ ID NO: 128, SEQ ID NO: 130, SEQ ID NO: 132, SEQ ID NO: 134, SEQ ID NO: 136, SEQ ID NO: 138, SEQ ID NO: 140, SEQ ID NO: , SEQ ID NO: 142, SEQ ID NO: 151, SEQ ID NO: 153, SEQ ID NO: 155, SEQ ID NO: 157, SEQ ID NO: 159, SEQ ID NO: 161, SEQ ID NO: 163, SEQ ID NO: 165, SEQ ID NO: 167, SEQ ID NO: 169, SEQ ID NO: 171, SEQ ID NO: 173, SEQ ID NO: 175, SEQ ID NO: 177, SEQ ID NO: 179, SEQ ID NO: 181, SEQ ID NO: 183, SEQ ID NO: 185, SEQ ID NO: 187, SEQ ID NO: 189, SEQ ID NO: 191, SEQ ID NO: 193, SEQ ID NO: 195, SEQ ID NO: 197, SEQ ID NO: 199, SEQ ID NO: 201, SEQ ID NO: 203, SEQ ID NO: 205, SEQ ID NO: 207, SEQ ID NO: 209, SEQ ID NO: 211, SEQ ID NO: 213, SEQ ID NO: 215, SEQ ID NO: 217, SEQ ID NO: 219, SEQ ID NO: 228, SEQ ID NO: 230, SEQ ID NO: 232, SEQ ID NO: 234, SEQ ID NO: 236, SEQ ID NO: 238, SEQ ID NO: 240, SEQ ID NO: 242, SEQ ID NO: 249, SEQ ID NO: 251, SEQ ID NO: 253, SEQ ID NO: 255, SEQ ID NO: 257, SEQ ID NO: 259, SEQ ID NO: 261, SEQ ID NO: 263, SEQ ID NO: 265, SEQ ID NO: 267, SEQ ID NO: 269, SEQ ID NO: 271, SEQ ID NO: 282, SEQ ID NO: 284, SEQ ID NO: 286, SEQ ID NO: 288, SEQ ID NO: 290, SEQ ID NO: 292, SEQ ID NO: 294, SEQ ID NO: 296, SEQ ID NO: 298, SEQ ID NO: 300, SEQ ID NO: 302, SEQ ID NO: 304, SEQ ID NO: 306, SEQ ID NO: 308, SEQ ID NO: 310, SEQ ID NO: 312, SEQ ID NO: 314, SEQ ID NO: 316, SEQ ID NO: 318, SEQ ID NO: 320, SEQ ID NO: 322, SEQ ID NO: 324, SEQ ID NO: 326, SEQ ID NO: 328, SEQ ID NO: 330, SEQ ID NO: 332, SEQ ID NO: 334, SEQ ID NO: 336, SEQ ID NO: 338, SEQ ID NO: 340, SEQ ID NO: 342, SEQ ID NO: 344, SEQ ID NO: 346, SEQ ID NO: 348, SEQ ID NO: 350, SEQ ID NO: 352, SEQ ID NO: 354, SEQ ID NO: 356, SEQ ID NO: 358, SEQ ID NO: 360, SEQ ID NO: 362, SEQ ID NO: 364, SEQ ID NO: 366, SEQ ID NO: 368, SEQ ID NO: 370, SEQ ID NO: 372, SEQ ID NO: 374, SEQ ID NO: 376, SEQ ID NO: 378, SEQ ID NO: 380, SEQ ID NO: 382, SEQ ID NO: 384, SEQ ID NO: 386, SEQ ID NO: 388, SEQ ID NO: 390, SEQ ID NO: 392, SEQ ID NO: 394, SEQ ID NO: 396, SEQ ID NO: 398, SEQ ID NO: 400, SEQ ID NO: 402, SEQ ID NO: 404, SEQ ID NO: 406, SEQ ID NO: 408, SEQ ID NO: 410, SEQ ID NO: 412, SEQ ID NO: 414, SEQ ID NO: 416, SEQ ID NO: 418, SEQ ID NO: 420, SEQ ID NO: 422, SEQ ID NO: 424, SEQ ID NO: 426, SEQ ID NO: 428, SEQ ID NO: 430, SEQ ID NO: 432, SEQ ID NO: 434 or SEQ ID NO: 440 or a derivative thereof, or
[0189] b) a genetic regulatory element, for example a promoter, which is functionally linked to the nucleic acid sequence as depicted in SEQ ID NO: 1, SEQ ID NO: 3, SEQ ID NO: 5, SEQ ID NO: 7, SEQ ID NO: 9, SEQ ID NO: 11, SEQ ID NO: 13, SEQ ID NO: 15, SEQ ID NO: 19, SEQ ID NO: 21, SEQ ID NO: 23, SEQ ID NO: 25, SEQ ID NO: 27, SEQ ID NO: 29, SEQ ID NO: 31; SEQ ID NO: 64, SEQ ID NO: 66, SEQ ID NO: 68, SEQ ID NO: 70, SEQ ID NO: 72, SEQ ID NO: 74, SEQ ID NO: 76, SEQ ID NO: 78, SEQ ID NO: 80, SEQ ID NO: 82, SEQ ID NO: 84, SEQ ID NO: 86, SEQ ID NO: 88, SEQ ID NO: 90, SEQ ID NO: 92, SEQ ID NO: 94, SEQ ID NO: 96, SEQ ID NO: 98, SEQ ID NO: 100, SEQ ID NO: 102, SEQ ID NO: 104, SEQ ID NO: 106, SEQ ID NO: 108, SEQ ID NO: 110, SEQ ID NO: 112, SEQ ID NO: 114, SEQ ID NO: 116, SEQ ID NO: 118, SEQ ID NO: 120, SEQ ID NO: 122, SEQ ID NO: 124, SEQ ID NO: 126, SEQ ID NO: 128, SEQ ID NO: 130, SEQ ID NO: 132, SEQ ID NO: 134, SEQ ID NO: 136, SEQ ID NO: 138, SEQ ID NO: 140, SEQ ID NO: , SEQ ID NO: 142, SEQ ID NO: 151, SEQ ID NO: 153, SEQ ID NO: 155, SEQ ID NO: 157, SEQ ID NO: 159, SEQ ID NO: 161, SEQ ID NO: 163, SEQ ID NO: 165, SEQ ID NO: 167, SEQ ID NO: 169, SEQ ID NO: 171, SEQ ID NO: 173, SEQ ID NO: 175, SEQ ID NO: 177, SEQ ID NO: 179, SEQ ID NO: 181, SEQ ID NO: 183, SEQ ID NO: 185, SEQ ID NO: 187, SEQ ID NO: 189, SEQ ID NO: 191, SEQ ID NO: 193, SEQ ID NO: 195, SEQ ID NO: 197, SEQ ID NO: 199, SEQ ID NO: 201, SEQ ID NO: 203, SEQ ID NO: 205, SEQ ID NO: 207, SEQ ID NO: 209, SEQ ID NO: 211, SEQ ID NO: 213, SEQ ID NO: 215, SEQ ID NO: 217, SEQ ID NO: 219, SEQ ID NO: 228, SEQ ID NO: 230, SEQ ID NO: 232, SEQ ID NO: 234, SEQ ID NO: 236, SEQ ID NO: 238, SEQ ID NO: 240, SEQ ID NO: 242, SEQ ID NO: 249, SEQ ID NO: 251, SEQ ID NO: 253, SEQ ID NO: 255, SEQ ID NO: 257, SEQ ID NO: 259, SEQ ID NO: 261, SEQ ID NO: 263, SEQ ID NO: 265, SEQ ID NO: 267, SEQ ID NO: 269, SEQ ID NO: 271, SEQ ID NO: 282, SEQ ID NO: 284, SEQ ID NO: 286, SEQ ID NO: 288, SEQ ID NO: 290, SEQ ID NO: 292, SEQ ID NO: 294, SEQ ID NO: 296, SEQ ID NO: 298, SEQ ID NO: 300, SEQ ID NO: 302, SEQ ID NO: 304, SEQ ID NO: 306, SEQ ID NO: 308, SEQ ID NO: 310, SEQ ID NO: 312, SEQ ID NO: 314, SEQ ID NO: 316, SEQ ID NO: 318, SEQ ID NO: 320, SEQ ID NO: 322, SEQ ID NO: 324, SEQ ID NO: 326, SEQ ID NO: 328, SEQ ID NO: 330, SEQ ID NO: 332, SEQ ID NO: 334, SEQ ID NO: 336, SEQ ID NO: 338, SEQ ID NO: 340, SEQ ID NO: 342, SEQ ID NO: 344, SEQ ID NO: 346, SEQ ID NO: 348, SEQ ID NO: 350, SEQ ID NO: 352, SEQ ID NO: 354, SEQ ID NO: 356, SEQ ID NO: 358, SEQ ID NO: 360, SEQ ID NO: 362, SEQ ID NO: 364, SEQ ID NO: 366, SEQ ID NO: 368, SEQ ID NO: 370, SEQ ID NO: 372, SEQ ID NO: 374, SEQ ID NO: 376, SEQ ID NO: 378, SEQ ID NO: 380, SEQ ID NO: 382, SEQ ID NO: 384, SEQ ID NO: 386, SEQ ID NO: 388, SEQ ID NO: 390, SEQ ID NO: 392, SEQ ID NO: 394, SEQ ID NO: 396, SEQ ID NO: 398, SEQ ID NO: 400, SEQ ID NO: 402, SEQ ID NO: 404, SEQ ID NO: 406, SEQ ID NO: 408, SEQ ID NO: 410, SEQ ID NO: 412, SEQ ID NO: 414, SEQ ID NO: 416, SEQ ID NO: 418, SEQ ID NO: 420, SEQ ID NO: 422, SEQ ID NO: 424, SEQ ID NO: 426, SEQ ID NO: 428, SEQ ID NO: 430, SEQ ID NO: 432, SEQ ID NO: 434 or SEQ ID NO: 440 or a derivative thereof, or
[0190] c) (a) and (b)
   is/are not present in its/their natural genetic environment or has/have been modified by means of genetic manipulation methods, it being possible for the modification to be, by way of example, a substitution, addition, deletion, inversion or insertion of one or more nucleotide radicals. “Natural genetic environment” means the natural chromosomal locus in the organism of origin or the presence in a genomic library. In the case of a genomic library, the natural, genetic environment of the nucleic acid sequence is preferably at least partially still preserved. The environment flanks the nucleic acid sequence at least on one side and has a sequence length of at least 50 bp, preferably at least 500 bp, particularly preferably at least 1000 bp, very particularly preferably at least 5000 bp.

[0191] However, transgenic also means that the nucleic acids according to the invention are located at their natural position in the genome of an organism, but that the sequence has been modified in comparison with the natural sequence and/or that the regulatory sequences of the natural sequences have been modified. Preferably, transgenic/recombinant is to be understood as meaning the expression of the nucleic acids used in the process according to the invention in a non-natural position in the genome, that is to say the expression of the nucleic acids is homologous or, preferably, heterologous. This expression can be transiently or of a sequence integrated stably into the genome.

[0192] The use of the nucleic acid sequence according to the invention or of the nucleic acid construct according to the invention for the generation of transgenic plants is therefore also subject matter of the invention.

[0193] The fine chemical, which is synthesized in the organism, in particular the microorganism, the plant or animal cell, the plant or animal tissue or the plant, of the invention can be isolated if desired. Depending on the use of the fine chemical, different purities resulting from the purification may be advantageous as will be described herein below.

[0194] In an advantageous embodiment of the invention, the organism takes the form of a plant whose amino acid content is modified advantageously owing to the modified activity of a nucleic acid molecule of the present invention expressed. This is important for plant breeders since, for example, the nutritional value of plants for monogastric animals is limited by a few essential amino acids such as lysine, threonine or methionine. After the biological activity of the protein of the invention has been reduced, decreased or deleted, or after the express ion of nucleic acid molecule or polypeptide according to the invention has been reduced or decreased, the transgenic plant generated thus is grown on or in a nutrient medium or else in the soil and subsequently harvested. The plants or parts thereof, e.g. the leaves, roots, flowers, and/or stems and/or other harvestable material as described below, can then be used directly as foodstuffs or animal feeds or else be further processed. Again, the amino acids can be purified further in the customary manner via extraction and precipitation or via ion exchangers and other methods known to the person skilled in the art and described herein below. Products which are suitable for various applications and which result from these different processing procedures are amino acids or amino acid compositions which can still comprise further plant components in different amounts, advantageously in the range of from 0 to 99% by weight, preferably from below 90% by weight, especially preferably below 80% by weight. The plants can also advantageously be used directly without further processing, e.g. as feed or for extraction.

[0195] Another embodiment of the invention is a process for the modification of the nucleic acid molecules of the invention encoded by the host organism for example by random mutagenesis with chemicals, radiation or UV-light or side directed mutagenesis in such a manner that the production of the fine chemical is increased. This embodiment of the invention shall be deemed as transgenic in the sense of the invention.

[0196] The process described above may also produce chemically pure amino acids or amino acid compositions. To this end, the amino acids or the amino acid compositions are isolated in the known manner from an organism according to the invention, such as the microorganisms, non-human animal or the plants, and/or their culture medium in which or on which the organisms had been grown. These chemically pure amino acids or amino acid compositions are advantageous for applications in the field of the food industry, the cosmetics industry or the pharmaceutical industry.

[0197] Thus, the content of plant components and preferably also further impurities is as low as possible, and the abovementioned amino acids are obtained in as pure form as possible. In these applications, the content of plant components advantageously amounts to less than 10%, preferably 1%, more preferably 0.1%, very especially preferably 0.01% or less.

[0198] Accordingly, the fine chemical produced by the present invention is at least 0.1% by weight pure, preferably more than 1% by weight pure, more preferred 10% by weight pure, even more preferred are more than 50, 60, 70 or 80% by weight purity, even more preferred are more than 90 weight-% purity, most preferred are 95% by weight, 99% by weight or more.

[0199] In this context, the amount of the fine chemical in a cell of the invention may be increased according to the process of the invention by at least a factor of 1.1, preferably at least a factor of 1.5; 2; or 5, especially preferably by at least a factor of 10 or 30, very especially preferably by at least a factor of 50, in comparison with the wild type, control or reference. Preferrably, said increase is found a tissue, more preferred in an organism or in a harvestable part thereof.

[0200] In principle, the amino acids produced can be increased in two ways by the process according to the invention. The pool of free amino acids, in particular of methionine, and/or the content of protein-bound methionine may advantageously be increased. It may be advantageous to increase the pool of free amino acids in the transgenic organisms by the process according to the invention in order to isolate pure methionine. Galili et al., Transgenic Res. 2000 showed, that enhancing the synthesis of threonine by a feed back insensitive aspartate kinase leads not only to in increase in free threonine but also in protein bound threonine. In another preferred embodiment of the invention is a combination of the reduction, decrease or deletion of the nucleic acid sequence or the protein of the invention together with the transformation of a protein or polypeptide, which functions as a sink for the desired amino acid for example methionine, lysine or threonine in the organism is useful to increase the production of the fine chemical (see U.S. Pat. No. 5,589,616, WO 96/38574, WO 97/07665, WO 97/28247, U.S. Pat. No. 4,886,878, U.S. Pat. No. 5,082,993 and U.S. Pat. No. 5,670,635).

[0201] In a preferred embodiment, methionine and/or threonine are produced in accordance with the invention and, if desired, are isolated. The production of further amino acids such as lysine and of amino acid mixtures by the process according to the invention is advantageous.

[0202] In the case of the fermentation of microorganisms, the above-mentioned amino acids may accumulate in the medium and/or the cells. If microorganisms are used in the process according to the invention, the fermentation broth can be processed after the cultivation. Depending on the requirement, all or some of the biomass can be removed from the fermentation broth by separation methods such as, for example, centrifugation, filtration, ultrafiltration, decanting or a combination of these methods, or else the biomass can be left in the fermentation broth. The fermentation broth can subsequently be reduced, or concentrated, with the aid of known methods such as, for example, rotary evaporator, thin-layer evaporator, falling film evaporator, by reverse osmosis or by nanofiltration. This concentrated fermentation broth can subsequently be processed by lyophilization, spray drying, spray granulation or by other methods.

[0203] To purify an amino acid, a product-containing fermentation broth from which the biomass has been separated may be subjected to chromatography with a suitable resin such as ion exchange resin for example anion or cation exchange resin, hydrophobic resin or hydrophilic resin for example epoxy resin, polyurethane resin or polyacrylamide resin, or resin for separation according to the molecular weight of the compounds for example polyvinyl chloride homopolymer resin or resins composed for example of polymers of acrylic acid, crosslinked with polyalkenyl ethers or divinyl glycol such as Carbopol®, Pemulen® and Noveon®, where all or some of the desired product or of the impurities are retained on the chromatography resin. If necessary these chromatography steps may be repeated using the same or other chromatography resins. The skilled worker is familiar with the choice of suitable chromatography resins and their most effective use. The purified product may be concentrated by filtration or ultrafiltration and stored at a temperature, which ensures the maximum stability of the product. Preferably amino acids are purified by using ion exchange chromatographies known by the person skilled in the art.

[0204] The identity and purity of the compound(s) isolated can be determined by prior-art techniques. They encompass high-performance liquid chromatography (HPLC), spectroscopic methods, mass spectrometry (MS), staining methods, thin-layer chromatography, NIRS, enzyme assays or microbiological assays. These analytical methods are compiled in: Patek et al. [(1994) Appl. Environ. Microbiol. 60:133-140]; Malakhova et al. [(1996) Biotekhnologiya 11 27-32]; and Schmidt et al. [(1998) Bioprocess Engineer. 19:67-70. Ulmann's Encyclopedia of Industrial Chemistry (1996) Bd. A27, VCH Weinheim, pp. 89-90, pp. 521-540, pp. 540-547, pp. 559-566, 575-581 and pp. 581-587;] Michal, G [(1999) Biochemical Pathways: An Atlas of Biochemistry and Molecular Biology, John Wiley and Sons]; Fallon, A. et al. [(1987) Applications of HPLC in Biochemistry in: Laboratory Techniques in Biochemistry and Molecular Biology, vol. 17].

[0205] In the inventive process as mentioned above preferably the reduction, decrease or deletion of the biological activity represented by protein of the invention is achieved by reducing, decreasing or deleting the expression of at least one nucleic acid molecule, wherein the nucleic acid molecule is selected from the group consisting of:
[0206] a) nucleic acid molecule encoding, preferably at least the mature form, of the polypeptide shown in SEQ ID NO: 2, SEQ ID NO: 4, SEQ ID NO: 6, SEQ ID NO: 8, SEQ ID NO: 10, SEQ ID NO: 12, SEQ ID NO: 14, SEQ ID NO: 16, SEQ ID NO: 20, SEQ ID NO: 22, SEQ ID NO: 24, SEQ ID NO: 26, SEQ ID NO: 23, SEQ ID NO. 30, SEQ ID NO: 32; SEQ ID NO: 65, SEQ ID NO: 67, SEQ ID NO: 69, SEQ ID NO: 71, SEQ ID NO: 73, SEQ ID NO: 75, SEQ ID NO: 77, SEQ ID NO: 79, SEQ ID NO: 81, SEQ ID NO: 83, SEQ ID NO: 85, SEQ ID NO: 87, SEQ ID NO: 89, SEQ ID NO: 91, SEQ ID NO: 93, SEQ ID NO: 95, SEQ ID NO: 97, SEQ ID NO: 99, SEQ ID NO: 101, SEQ ID NO: 103, SEQ ID NO: 105, SEQ ID NO: 107, SEQ ID NO: 109, SEQ ID NO: 111, SEQ ID NO: 113, SEQ ID NO: 115, SEQ ID NO: 117, SEQ ID NO: 119, SEQ ID NO: 121, SEQ ID NO: 123, SEQ ID NO: 125, SEQ ID NO: 127, SEQ ID NO: 129, SEQ ID NO: 131, SEQ ID NO: 133, SEQ ID NO: 135, SEQ ID NO: 137, SEQ ID NO: 139, SEQ ID NO: 141, SEQ ID NO: 143, SEQ ID NO: 152, SEQ ID NO: 154, SEQ ID NO: 156, SEQ ID NO: 158, SEQ ID NO: 160, SEQ ID NO: 162, SEQ ID NO: 164, SEQ ID NO: 166, SEQ ID NO: 168, SEQ ID NO: 170, SEQ ID NO: 172, SEQ ID NO: 174, SEQ ID NO: 176, SEQ ID NO: 178, SEQ ID NO: 180, SEQ ID NO: 182, SEQ ID NO: 184, SEQ ID NO: 186, SEQ ID NO: 188, SEQ ID NO: 190, SEQ ID NO: 192, SEQ ID NO: 194, SEQ ID NO: 196, SEQ ID NO: 198, SEQ ID NO: 200, SEQ ID NO: 202, SEQ ID NO: 204, SEQ ID NO: 206, SEQ ID NO: 208, SEQ ID NO: 210, SEQ ID NO: 212, SEQ ID NO: 214, SEQ ID NO: 216, SEQ ID NO: 218, SEQ ID NO: 220, SEQ ID NO: 229, SEQ ID NO:231, SEQ ID NO:233, SEQ ID NO: 235, SEQ ID NO: 237, SEQ ID NO: 239, SEQ ID NO: 241, SEQ ID NO: 243, SEQ ID NO: 250, SEQ ID NO: 252, SEQ ID NO: 254, SEQ ID NO: 256, SEQ ID NO: 258, SEQ ID NO: 260, SEQ ID NO: 262, SEQ ID NO: 264, SEQ ID NO: 266, SEQ ID NO: 268, SEQ ID NO: 270, SEQ ID NO: 272, SEQ ID NO: 283, SEQ ID NO: 285, SEQ ID NO: 287, SEQ ID NO: 289, SEQ ID NO: 291, SEQ ID NO: 293, SEQ ID NO: 295, SEQ ID NO: 297, SEQ ID NO: 299, SEQ ID NO: 301, SEQ ID NO: 303, SEQ ID NO: 305, SEQ ID NO: 307, SEQ ID NO: 309, SEQ ID NO: 311, SEQ ID NO: 313, SEQ ID NO: 315, SEQ ID NO: 317, SEQ ID NO: 319, SEQ ID NO: 321, SEQ ID NO: 323, SEQ ID NO: 325, SEQ ID NO: 327, SEQ ID NO: 329, SEQ ID NO: 331, SEQ ID NO: 333, SEQ ID NO: 335, SEQ ID NO: 337, SEQ ID NO: 339, SEQ ID NO: 341, SEQ ID NO: 343, SEQ ID NO: 345, SEQ ID NO: 347, SEQ ID NO: 349, SEQ ID NO: 351, SEQ ID NO: 353, SEQ ID NO: 355, SEQ ID NO: 357, SEQ ID NO: 359, SEQ ID NO: 361, SEQ ID NO: 363, SEQ ID NO: 365, SEQ ID NO: 367, SEQ ID NO: 369, SEQ ID NO: 371, SEQ ID NO: 373, SEQ ID NO: 375, SEQ ID NO: 377, SEQ ID NO: 379, SEQ ID NO: 381, SEQ ID NO: 383, SEQ ID NO: 385, SEQ ID NO: 387, SEQ ID NO: 389, SEQ ID NO: 391, SEQ ID NO: 393, SEQ ID NO: 395, SEQ ID NO: 397, SEQ ID NO: 399, SEQ ID NO: 401, SEQ ID NO: 403, SEQ ID NO: 405, SEQ ID NO: 407, SEQ ID NO: 409, SEQ ID NO: 411, SEQ ID NO: 413, SEQ ID NO: 415, SEQ ID NO: 417, SEQ ID NO: 419, SEQ ID NO: 421, SEQ ID NO: 423, SEQ ID NO: 425, SEQ ID NO: 427, SEQ ID NO: 429, SEQ ID NO: 431, SEQ ID NO: 433, SEQ ID NO: 435 or SEQ ID NO: 441;
[0207] b) nucleic acid molecule comprising, preferably at least the mature form, of the nucleic acid molecule shown in SEQ ID NO: 1, SEQ ID NO: 3, SEQ ID NO: 5, SEQ ID NO: 7, SEQ ID NO: 9, SEQ ID NO: 11, SEQ ID NO: 13, SEQ ID NO: 15, SEQ ID NO: 19, SEQ ID NO: 21, SEQ ID NO: 23, SEQ ID NO: 25, SEQ ID NO: 27, SEQ ID NO: 29, SEQ ID NO: 31; SEQ ID NO: 64, SEQ ID NO: 66, SEQ ID NO: 68, SEQ ID NO: 70, SEQ ID NO: 72, SEQ ID NO: 74, SEQ ID NO: 76, SEQ ID NO: 78, SEQ ID NO: 80, SEQ ID NO: 82, SEQ ID NO: 84, SEQ ID NO: 86, SEQ ID NO: 88, SEQ ID NO: 90, SEQ ID NO: 92, SEQ ID NO: 94, SEQ ID NO: 96, SEQ ID NO: 98, SEQ ID NO: 100, SEQ ID NO: 102, SEQ ID NO: 104, SEQ ID NO: 106, SEQ ID NO: 108, SEQ ID NO: 110, SEQ ID NO: 112, SEQ ID NO: 114, SEQ ID NO: 116, SEQ ID NO: 118, SEQ ID NO: 120, SEQ ID NO: 122, SEQ ID NO: 124, SEQ ID NO: 126, SEQ ID NO: 128, SEQ ID NO: 130, SEQ ID NO: 132, SEQ ID NO: 134, SEQ ID NO: 136, SEQ ID NO: 138, SEQ ID NO: 140, SEQ ID NO: , SEQ ID NO: 142, SEQ ID NO: 151, SEQ ID NO: 153, SEQ ID NO: 155, SEQ ID NO: 157, SEQ ID NO: 159, SEQ ID NO: 161, SEQ ID NO: 163, SEQ ID NO: 165, SEQ ID NO: 167, SEQ ID NO: 169, SEQ ID NO: 171, SEQ ID NO: 173, SEQ ID NO: 175, SEQ ID NO: 177, SEQ ID NO: 179, SEQ ID NO: 181, SEQ ID NO: 183, SEQ ID NO: 185, SEQ ID NO: 187, SEQ ID NO: 189, SEQ ID NO: 191, SEQ ID NO: 193, SEQ ID NO: 195, SEQ ID NO: 197, SEQ ID NO: 199, SEQ ID NO: 201, SEQ ID NO: 203, SEQ ID NO: 205, SEQ ID NO: 207, SEQ ID NO: 209, SEQ ID NO: 211, SEQ ID NO: 213, SEQ ID NO: 215, SEQ ID NO: 217, SEQ ID NO: 219, SEQ ID NO: 228, SEQ ID NO: 230, SEQ ID NO: 232, SEQ ID NO: 234, SEQ ID NO: 236, SEQ ID NO: 238, SEQ ID NO: 240, SEQ ID NO: 242, SEQ ID NO: 249, SEQ ID NO: 251, SEQ ID NO: 253, SEQ ID NO: 255, SEQ ID NO: 257, SEQ ID NO: 259, SEQ ID NO: 261, SEQ ID NO: 263, SEQ ID NO: 265, SEQ ID NO: 267, SEQ ID NO: 269, SEQ ID NO: 271, SEQ ID NO: 282, SEQ ID NO: 284, SEQ ID NO: 286, SEQ ID NO: 288, SEQ ID NO: 290, SEQ ID NO: 292, SEQ ID NO: 294, SEQ ID NO: 296, SEQ ID NO: 298, SEQ ID NO: 300, SEQ ID NO: 302, SEQ ID NO: 304, SEQ ID NO: 306, SEQ ID NO: 308, SEQ ID NO: 310, SEQ ID NO: 312, SEQ ID NO: 314, SEQ ID NO: 316, SEQ ID NO: 318, SEQ ID NO: 320, SEQ ID NO: 322, SEQ ID NO: 324, SEQ ID NO: 326, SEQ ID NO: 328, SEQ ID NO: 330, SEQ ID NO: 332, SEQ ID NO: 334, SEQ ID NO: 336, SEQ ID NO: 338, SEQ ID NO: 340, SEQ ID NO: 342, SEQ ID NO: 344, SEQ ID NO: 346, SEQ ID NO: 348, SEQ ID NO: 350, SEQ ID NO: 352, SEQ ID NO: 354, SEQ ID NO: 356, SEQ ID NO: 358, SEQ ID NO: 360, SEQ ID NO: 362, SEQ ID NO: 364, SEQ ID NO: 366, SEQ ID NO: 368, SEQ ID NO: 370, SEQ ID NO: 372, SEQ ID NO: 374, SEQ ID NO: 376, SEQ ID NO: 378, SEQ ID NO: 380, SEQ ID NO: 382, SEQ ID NO: 384, SEQ ID NO: 386, SEQ ID NO: 388, SEQ ID NO: 390, SEQ ID NO: 392, SEQ ID NO: 394, SEQ ID NO: 396, SEQ ID NO: 398, SEQ ID NO: 400, SEQ ID NO: 402, SEQ ID NO: 404, SEQ ID NO: 406, SEQ ID NO: 408, SEQ ID NO: 410, SEQ ID NO: 412, SEQ ID NO: 414, SEQ ID NO: 416, SEQ ID NO: 418, SEQ ID NO: 420, SEQ ID NO: 422, SEQ ID NO: 424, SEQ ID NO: 426, SEQ ID NO: 428, SEQ ID NO: 430, SEQ ID NO: 432, SEQ ID NO: 434 or SEQ ID NO: 440;
[0208] c) nucleic acid molecule comprising a nucleic acid sequence, which, as a result of the degeneracy of the genetic code, can be derived from a polypeptide sequence depicted in SEQ ID NO: 2, SEQ ID NO: 4, SEQ ID NO: 6, SEQ ID NO: 8, SEQ ID NO: 10, SEQ ID NO: 12, SEQ ID NO: 14, SEQ ID NO: 16, SEQ ID NO: 20, SEQ ID NO: 22, SEQ ID NO: 24, SEQ ID NO: 26, SEQ ID NO: 28, SEQ ID NO. 30, SEQ ID NO: 32; SEQ ID NO: 65, SEQ ID NO: 67, SEQ ID NO: 69, SEQ ID NO: 71, SEQ ID NO: 73, SEQ ID NO: 75, SEQ ID NO: 77, SEQ ID NO: 79, SEQ ID NO: 81, SEQ ID NO: 83, SEQ ID NO: 85, SEQ ID NO: 87, SEQ ID NO: 89, SEQ ID NO: 91, SEQ ID NO: 93, SEQ ID NO: 95, SEQ ID NO: 97, SEQ ID NO: 99, SEQ ID NO: 101, SEQ ID NO: 103, SEQ ID NO: 105, SEQ ID NO: 107, SEQ ID NO: 109, SEQ ID NO: 111, SEQ ID NO: 113, SEQ ID NO: 115, SEQ ID NO: 117, SEQ ID NO: 119, SEQ ID NO: 121, SEQ ID NO: 123, SEQ ID NO: 125, SEQ ID NO: 127, SEQ ID NO: 129, SEQ ID NO: 131, SEQ ID NO: 133, SEQ ID NO: 135, SEQ ID NO: 137, SEQ ID NO: 139, SEQ ID NO: 141, SEQ ID NO: 143, SEQ ID NO: 152, SEQ ID NO: 154, SEQ ID NO: 156, SEQ ID NO: 158, SEQ ID NO: 160, SEQ ID NO: 162, SEQ ID NO: 164, SEQ ID NO: 166, SEQ ID NO: 168, SEQ ID NO: 170, SEQ ID NO: 172, SEQ ID NO: 174, SEQ ID NO: 176, SEQ ID NO: 178, SEQ ID NO: 180, SEQ ID NO: 182, SEQ ID NO: 184, SEQ ID NO: 186, SEQ ID NO: 188, SEQ ID NO: 190, SEQ ID NO: 192, SEQ ID NO: 194, SEQ ID NO: 196, SEQ ID NO: 198, SEQ ID NO: 200, SEQ ID NO: 202, SEQ ID NO: 204, SEQ ID NO: 206, SEQ ID NO: 208, SEQ ID NO: 210, SEQ ID NO: 212, SEQ ID NO: 214, SEQ ID NO: 216, SEQ ID NO: 218, SEQ ID NO: 220, SEQ ID NO: 229, SEQ ID NO:231, SEQ ID NO:233, SEQ ID NO: 235, SEQ ID NO: 237, SEQ ID NO: 239, SEQ ID NO: 241, SEQ ID NO: 243, SEQ ID NO: 250, SEQ ID NO: 252, SEQ ID NO: 254, SEQ ID NO: 256, SEQ ID NO: 258, SEQ ID NO: 260, SEQ ID NO: 262, SEQ ID NO: 264, SEQ ID NO: 266, SEQ ID NO: 268, SEQ ID NO: 270, SEQ ID NO: 272, SEQ ID NO: 283, SEQ ID NO: 285, SEQ ID NO: 287, SEQ ID NO: 289, SEQ ID NO: 291, SEQ ID NO: 293, SEQ ID NO: 295, SEQ ID NO: 297, SEQ ID NO: 299, SEQ ID NO: 301, SEQ ID NO: 303, SEQ ID NO: 305, SEQ ID NO: 307, SEQ ID NO: 309, SEQ ID NO: 311, SEQ ID NO: 313, SEQ ID NO: 315, SEQ ID NO: 317, SEQ ID NO: 319, SEQ ID NO: 321, SEQ ID NO: 323, SEQ ID NO: 325, SEQ ID NO: 327, SEQ ID NO: 329, SEQ ID NO: 331, SEQ ID NO: 333, SEQ ID NO: 335, SEQ ID NO: 337, SEQ ID NO: 339, SEQ ID NO: 341, SEQ ID NO: 343, SEQ ID NO: 345, SEQ ID NO: 347, SEQ ID NO: 349, SEQ ID NO: 351, SEQ ID NO: 353, SEQ ID NO: 355, SEQ ID NO: 357, SEQ ID NO: 359, SEQ ID NO: 361, SEQ ID NO: 363, SEQ ID NO: 365, SEQ ID NO: 367, SEQ ID NO: 369, SEQ ID NO: 371, SEQ ID NO: 373, SEQ ID NO: 375, SEQ ID NO: 377, SEQ ID NO: 379, SEQ ID NO: 381, SEQ ID NO: 383, SEQ ID NO: 385, SEQ ID NO: 387, SEQ ID NO: 389, SEQ ID NO: 391, SEQ ID NO: 393, SEQ ID NO: 395, SEQ ID NO: 397, SEQ ID NO: 399, SEQ ID NO: 401, SEQ ID NO: 403, SEQ ID NO: 405, SEQ ID NO: 407, SEQ ID NO: 409, SEQ ID NO: 411, SEQ ID NO: 413, SEQ ID NO: 415, SEQ ID NO: 417, SEQ ID NO: 419, SEQ ID NO: 421, SEQ ID NO: 423, SEQ ID NO: 425, SEQ ID NO: 427, SEQ ID NO: 429, SEQ ID NO: 431, SEQ ID NO: 433, SEQ ID NO: 435 or SEQ ID NO: 441 and having the biological activity represented by protein as depicted in SEQ ID NO: 2, SEQ ID NO: 8, SEQ ID NO: 20, SEQ ID NO: 65, SEQ ID NO: 152, SEQ ID NO: 229 or SEQ ID NO: 283;
[0209] d) nucleic acid molecule encoding a polypeptide having at least 50% identity with the amino acid sequence of the polypeptide encoded by the nucleic acid molecule of (a) to (c) and having the biological activity represented by protein as depicted in SEQ ID NO: 2, SEQ ID NO: 8, SEQ ID NO: 20, SEQ ID NO: 65, SEQ ID NO: 152, SEQ ID NO: 229 or SEQ ID NO: 283;
[0210] e) nucleic acid molecule which comprises a polynucleotide which is obtained by amplifying a cDNA library or a genomic library using the primers depicted in SEQ ID NO: 58, SEQ ID NO: 59, SEQ ID NO: 60, SEQ ID NO: 61, SEQ ID NO: 62, SEQ ID NO: 63, SEQ ID NO: 144, SEQ ID NO: 145, SEQ ID NO: 221, SEQ ID NO: 222, SEQ ID NO: 244, SEQ ID NO: 245, SEQ ID NO: 436 or SEQ ID NO: 437 and having the biological activity represented by protein as depicted in SEQ ID NO: 2, SEQ ID NO: 8, SEQ ID NO: 20, SEQ ID NO: 65, SEQ ID NO: 152, SEQ ID NO: 229 or SEQ ID NO: 283;
[0211] f) nucleic acid molecule which encodes a polypeptide, the polypeptide being derived by substituting, deleting and/or adding one or more amino acids of the amino acid sequence of the polypeptide encoded by the nucleic acid molecules (a) to (d), preferably to (a) to (b) or (c) and encoding a polypeptide having the biological activity represented by protein as depicted in SEQ ID NO: 2, SEQ ID NO: 8, SEQ ID NO: 20, SEQ ID NO: 65, SEQ ID NO: 152, SEQ ID NO: 229 or SEQ ID NO: 283;
[0212] g) nucleic acid molecule which encodes a fragment or an epitope of a polypeptide which is encoded by one of the nucleic acid molecules of (a) to (e), preferably to (a) to (b) or (c) and encoding a polypeptide having the biological activity represented by protein as depicted in SEQ ID NO: 2, SEQ ID NO: 8, SEQ ID NO: 20, SEQ ID NO: 65, SEQ ID NO: 152, SEQ ID NO: 229 or SEQ ID NO: 283;
[0213] h) nucleic acid molecule encoding a polypeptide which is isolated with the aid of monoclonal or polyclonal antibodies against a polypeptide encoded by one of the nucleic acid molecules of (a) to (e), preferably to (a) to (b) or (c), and having the biological activity represented by the protein as depicted in SEQ ID NO: 2, SEQ ID NO: 8, SEQ ID NO: 20, SEQ ID NO: 65, SEQ ID NO: 152, SEQ ID NO: 229 or SEQ ID NO: 283;
[0214] i) nucleic acid molecule encoding a polypeptide comprising the consensus sequence shown in SEQ ID NO: 33, SEQ ID NO: 34, SEQ ID NO: 146, SEQ ID NO: 147, SEQ ID NO: 148, SEQ ID NO: 149, SEQ ID NO: 150, SEQ ID NO: 223, SEQ ID NO: 224, SEQ ID NO: 225, SEQ ID NO: 226, SEQ ID NO: 227, SEQ ID NO: 246, SEQ ID NO: 247, SEQ ID NO: 248, SEQ ID NO: 273, SEQ ID NO: 274, SEQ ID NO: 275, SEQ ID NO: 276, SEQ ID NO: 277, SEQ ID NO: 278, SEQ ID NO: 279, SEQ ID NO: 280, SEQ ID NO: 281, SEQ ID NO: 438, SEQ ID NO: 439 or SEQ ID NO: 442 and having the biological activity represented by the protein as depicted in SEQ ID NO: 2, SEQ ID NO: 8, SEQ ID NO: 20, SEQ ID NO: 65, SEQ ID NO: 152, SEQ ID NO: 229 or SEQ ID NO: 283;
[0215] j) nucleic acid molecule encoding a polypeptide having the biological activity represented by the protein SEQ ID NO: 2, SEQ ID NO: 4, SEQ ID NO: 6, SEQ ID NO: 8, SEQ ID NO: 10, SEQ ID NO: 12, SEQ ID NO: 14, SEQ ID NO: 16, SEQ ID NO: 20, SEQ ID NO: 22, SEQ ID NO: 24, SEQ ID NO: 26, SEQ ID NO: 28, SEQ ID NO. 30, SEQ ID NO: 32; SEQ ID NO: 65, SEQ ID NO: 67, SEQ ID NO: 69, SEQ ID NO: 71, SEQ ID NO: 73, SEQ ID NO: 75, SEQ ID NO: 77, SEQ ID NO: 79, SEQ ID NO: 81, SEQ ID NO: 83, SEQ ID NO: 85, SEQ ID NO: 87, SEQ ID NO: 89, SEQ ID NO: 91, SEQ ID NO: 93, SEQ ID NO: 95, SEQ ID NO: 97, SEQ ID NO: 99, SEQ ID NO: 101, SEQ ID NO: 103, SEQ ID NO: 105, SEQ ID NO: 107, SEQ ID NO: 109, SEQ ID NO: 111, SEQ ID NO: 113, SEQ ID NO: 115, SEQ ID NO: 117, SEQ ID NO: 119, SEQ ID NO: 121, SEQ ID NO: 123, SEQ ID NO: 125, SEQ ID NO: 127, SEQ ID NO: 129, SEQ ID NO: 131, SEQ ID NO: 133, SEQ ID NO: 135, SEQ ID NO: 137, SEQ ID NO: 139, SEQ ID NO: 141, SEQ ID NO: 143, SEQ ID NO: 152, SEQ ID NO: 154, SEQ ID NO: 156, SEQ ID NO: 158, SEQ ID NO: 160, SEQ ID NO: 162, SEQ ID NO: 164, SEQ ID NO: 166, SEQ ID NO: 168, SEQ ID NO: 170, SEQ ID NO: 172, SEQ ID NO: 174, SEQ ID NO: 176, SEQ ID NO: 178, SEQ ID NO: 180, SEQ ID NO: 182, SEQ ID NO: 184, SEQ ID NO: 186, SEQ ID NO: 188, SEQ ID NO: 190, SEQ ID NO: 192, SEQ ID NO: 194, SEQ ID NO: 196, SEQ ID NO: 198, SEQ ID NO: 200, SEQ ID NO: 202, SEQ ID NO: 204, SEQ ID NO: 206, SEQ ID NO: 208, SEQ ID NO: 210, SEQ ID NO: 212, SEQ ID NO: 214, SEQ ID NO: 216, SEQ ID NO: 218, SEQ ID NO: 220, SEQ ID NO: 229, SEQ ID NO:231, SEQ ID NO:233, SEQ ID NO: 235, SEQ ID NO: 237, SEQ ID NO: 239, SEQ ID NO: 241, SEQ ID NO: 243, SEQ ID NO: 250, SEQ ID NO: 252, SEQ ID NO: 254, SEQ ID NO: 256, SEQ ID NO: 258, SEQ ID NO: 260, SEQ ID NO: 262, SEQ ID NO: 264, SEQ ID NO: 266, SEQ ID NO: 268, SEQ ID NO: 270, SEQ ID NO: 272, SEQ ID NO: 283, SEQ ID NO: 285, SEQ ID NO: 287, SEQ ID NO: 289, SEQ ID NO: 291, SEQ ID NO: 293, SEQ ID NO: 295, SEQ ID NO: 297, SEQ ID NO: 299, SEQ ID NO: 301, SEQ ID NO: 303, SEQ ID NO: 305, SEQ ID NO: 307, SEQ ID NO: 309, SEQ ID NO: 311, SEQ ID NO: 313, SEQ ID NO: 315, SEQ ID NO: 317, SEQ ID NO: 319, SEQ ID NO: 321, SEQ ID NO: 323, SEQ ID NO: 325, SEQ ID NO: 327, SEQ ID NO: 329, SEQ ID NO: 331, SEQ ID NO: 333, SEQ ID NO: 335, SEQ ID NO: 337, SEQ ID NO: 339, SEQ ID NO: 341, SEQ ID NO: 343, SEQ ID NO: 345, SEQ ID NO: 347, SEQ ID NO: 349, SEQ ID NO: 351, SEQ ID NO: 353, SEQ ID NO: 355, SEQ ID NO: 357, SEQ ID NO: 359, SEQ ID NO: 361, SEQ ID NO: 363, SEQ ID NO: 365, SEQ ID NO: 367, SEQ ID NO: 369, SEQ ID NO: 371, SEQ ID NO: 373, SEQ ID NO: 375, SEQ ID NO: 377, SEQ ID NO: 379, SEQ ID NO: 381, SEQ ID NO: 383, SEQ ID NO: 385, SEQ ID NO: 387, SEQ ID NO: 389, SEQ ID NO: 391, SEQ ID NO: 393, SEQ ID NO: 395, SEQ ID NO: 397, SEQ ID NO: 399, SEQ ID NO: 401, SEQ ID NO: 403, SEQ ID NO: 405, SEQ ID NO: 407, SEQ ID NO: 409, SEQ ID NO: 411, SEQ ID NO: 413, SEQ ID NO: 415, SEQ ID NO: 417, SEQ ID NO: 419, SEQ ID NO: 421, SEQ ID NO: 423, SEQ ID NO: 425, SEQ ID NO: 427, SEQ ID NO: 429, SEQ ID NO: 431, SEQ ID NO: 433, SEQ ID NO: 435 or SEQ ID NO: 441; and
[0216] k) nucleic acid molecule which is obtainable by screening a suitable nucleic acid library under stringent hybridisation conditions with a probe comprising one of the sequences of the nucleic acid molecule of (a) or (b) or with a fragment thereof having at least 15 nt, preferably 20 nt, 30 nt, 50 nt, 100 nt, 200 nt or 500 nt of the nucleic acid molecule characterized in (a) to (c) and encoding a polypeptide having the biological activity represented by protein as depicted in SEQ ID NO: 2, SEQ ID NO: 8, SEQ ID NO: 20, SEQ ID NO: 65, SEQ ID NO: 152, SEQ ID NO: 229 or SEQ ID NO: 283
   [0217] or which comprises a sequence which is complementary thereto.

[0218] In one embodiment, the nucleic acid molecule used in the process distinguishes over the sequence depicted in SEQ ID NO: 1, SEQ ID NO: 3, SEQ ID NO: 5, SEQ ID NO: 7, SEQ ID NO: 9, SEQ ID NO: 11, SEQ ID NO: 13, SEQ ID NO: 15, SEQ ID NO: 19, SEQ ID NO: 21, SEQ ID NO: 23, SEQ ID NO: 25, SEQ ID NO: 27, SEQ ID NO: 29, SEQ ID NO: 31; SEQ ID NO: 64, SEQ ID NO: 66, SEQ ID NO: 68, SEQ ID NO: 70, SEQ ID NO: 72, SEQ ID NO: 74, SEQ ID NO: 76, SEQ ID NO: 78, SEQ ID NO: 80, SEQ ID NO: 82, SEQ ID NO: 84, SEQ ID NO: 86, SEQ ID NO: 88, SEQ ID NO: 90, SEQ ID NO: 92, SEQ ID NO: 94, SEQ ID NO: 96, SEQ ID NO: 98, SEQ ID NO: 100, SEQ ID NO: 102, SEQ ID NO: 104, SEQ ID NO: 106, SEQ ID NO: 108, SEQ ID NO: 110, SEQ ID NO: 112, SEQ ID NO: 114, SEQ ID NO: 116, SEQ ID NO: 118, SEQ ID NO: 120, SEQ ID NO: 122, SEQ ID NO: 124, SEQ ID NO: 126, SEQ ID NO: 128, SEQ ID NO: 130, SEQ ID NO: 132, SEQ ID NO: 134, SEQ ID NO: 136, SEQ ID NO: 138, SEQ ID NO: 140, SEQ ID NO: , SEQ ID NO: 142, SEQ ID NO: 151, SEQ ID NO: 153, SEQ ID NO: 155, SEQ ID NO: 157, SEQ ID NO: 159, SEQ ID NO: 161, SEQ ID NO: 163, SEQ ID NO: 165, SEQ ID NO: 167, SEQ ID NO: 169, SEQ ID NO: 171, SEQ ID NO: 173, SEQ ID NO: 175, SEQ ID NO: 177, SEQ ID NO: 179, SEQ ID NO: 181, SEQ ID NO: 183, SEQ ID NO: 185, SEQ ID NO: 187, SEQ ID NO: 189, SEQ ID NO: 191, SEQ ID NO: 193, SEQ ID NO: 195, SEQ ID NO: 197, SEQ ID NO: 199, SEQ ID NO: 201, SEQ ID NO: 203, SEQ ID NO: 205, SEQ ID NO: 207, SEQ ID NO: 209, SEQ ID NO: 211, SEQ ID NO: 213, SEQ ID NO: 215, SEQ ID NO: 217, SEQ ID NO: 219, SEQ ID NO: 228, SEQ ID NO: 230, SEQ ID NO: 232, SEQ ID NO: 234, SEQ ID NO: 236, SEQ ID NO: 238, SEQ ID NO: 240, SEQ ID NO: 242, SEQ ID NO: 249, SEQ ID NO: 251, SEQ ID NO: 253, SEQ ID NO: 255, SEQ ID NO: 257, SEQ ID NO: 259, SEQ ID NO: 261, SEQ ID NO: 263, SEQ ID NO: 265, SEQ ID NO: 267, SEQ ID NO: 269, SEQ ID NO: 271, SEQ ID NO: 282, SEQ ID NO: 284, SEQ ID NO: 286, SEQ ID NO: 288, SEQ ID NO: 290, SEQ ID NO: 292, SEQ ID NO: 294, SEQ ID NO: 296, SEQ ID NO: 298, SEQ ID NO: 300, SEQ ID NO: 302, SEQ ID NO: 304, SEQ ID NO: 306, SEQ ID NO: 308, SEQ ID NO: 310, SEQ ID NO: 312, SEQ ID NO: 314, SEQ ID NO: 316, SEQ ID NO: 318, SEQ ID NO: 320, SEQ ID NO: 322, SEQ ID NO: 324, SEQ ID NO: 326, SEQ ID NO: 328, SEQ ID NO: 330, SEQ ID NO: 332, SEQ ID NO: 334, SEQ ID NO: 336, SEQ ID NO: 338, SEQ ID NO: 340, SEQ ID NO: 342, SEQ ID NO: 344, SEQ ID NO: 346, SEQ ID NO: 348, SEQ ID NO: 350, SEQ ID NO: 352, SEQ ID NO: 354, SEQ ID NO: 356, SEQ ID NO: 358, SEQ ID NO: 360, SEQ ID NO: 362, SEQ ID NO: 364, SEQ ID NO: 366, SEQ ID NO: 368, SEQ ID NO: 370, SEQ ID NO: 372, SEQ ID NO: 374, SEQ ID NO: 376, SEQ ID NO: 378, SEQ ID NO: 380, SEQ ID NO: 382, SEQ ID NO: 384, SEQ ID NO: 386, SEQ ID NO: 388, SEQ ID NO: 390, SEQ ID NO: 392, SEQ ID NO: 394, SEQ ID NO: 396, SEQ ID NO: 398, SEQ ID NO: 400, SEQ ID NO: 402, SEQ ID NO: 404, SEQ ID NO: 406, SEQ ID NO: 408, SEQ ID NO: 410, SEQ ID NO: 412, SEQ ID NO: 414, SEQ ID NO: 416, SEQ ID NO: 418, SEQ ID NO: 420, SEQ ID NO: 422, SEQ ID NO: 424, SEQ ID NO: 426, SEQ ID NO: 428, SEQ ID NO: 430, SEQ ID NO: 432, SEQ ID NO: 434 or SEQ ID NO: 440 by at least one or more nucleotides or does not consist of the sequence shown in SEQ ID NO: 1, SEQ ID NO: 3, SEQ ID NO: 5, SEQ ID NO: 7, SEQ ID NO: 9, SEQ ID NO: 11, SEQ ID NO: 13, SEQ ID NO: 15, SEQ ID NO: 19, SEQ ID NO: 21, SEQ ID NO: 23, SEQ ID NO: 25, SEQ ID NO: 27, SEQ ID NO: 29, SEQ ID NO: 31; SEQ ID NO: 64, SEQ ID NO: 66, SEQ ID NO: 68, SEQ ID NO: 70, SEQ ID NO: 72, SEQ ID NO: 74, SEQ ID NO: 76, SEQ ID NO: 78, SEQ ID NO: 80, SEQ ID NO: 82, SEQ ID NO: 84, SEQ ID NO: 86, SEQ ID NO: 88, SEQ ID NO: 90, SEQ ID NO: 92, SEQ ID NO: 94, SEQ ID NO: 96, SEQ ID NO: 98, SEQ ID NO: 100, SEQ ID NO: 102, SEQ ID NO: 104, SEQ ID NO: 106, SEQ ID NO: 108, SEQ ID NO: 110, SEQ ID NO: 112, SEQ ID NO: 114, SEQ ID NO: 116, SEQ ID NO: 118, SEQ ID NO: 120, SEQ ID NO: 122, SEQ ID NO: 124, SEQ ID NO: 126, SEQ ID NO: 128, SEQ ID NO: 130, SEQ ID NO: 132, SEQ ID NO: 134, SEQ ID NO: 136, SEQ ID NO: 138, SEQ ID NO: 140, SEQ ID NO: , SEQ ID NO: 142, SEQ ID NO: 151, SEQ ID NO: 153, SEQ ID NO: 155, SEQ ID NO: 157, SEQ ID NO: 159, SEQ ID NO: 161, SEQ ID NO: 163, SEQ ID NO: 165, SEQ ID NO: 167, SEQ ID NO: 169, SEQ ID NO: 171, SEQ ID NO: 173, SEQ ID NO: 175, SEQ ID NO: 177, SEQ ID NO: 179, SEQ ID NO: 181, SEQ ID NO: 183, SEQ ID NO: 185, SEQ ID NO: 187, SEQ ID NO: 189, SEQ ID NO: 191, SEQ ID NO: 193, SEQ ID NO: 195, SEQ ID NO: 197, SEQ ID NO: 199, SEQ ID NO: 201, SEQ ID NO: 203, SEQ ID NO: 205, SEQ ID NO: 207, SEQ ID NO: 209, SEQ ID NO: 211, SEQ ID NO: 213, SEQ ID NO: 215, SEQ ID NO: 217, SEQ ID NO: 219, SEQ ID NO: 228, SEQ ID NO: 230, SEQ ID NO: 232, SEQ ID NO: 234, SEQ ID NO: 236, SEQ ID NO: 238, SEQ ID NO: 240, SEQ ID NO: 242, SEQ ID NO: 249, SEQ ID NO: 251, SEQ ID NO: 253, SEQ ID NO: 255, SEQ ID NO: 257, SEQ ID NO: 259, SEQ ID NO: 261, SEQ ID NO: 263, SEQ ID NO: 265, SEQ ID NO: 267, SEQ ID NO: 269, SEQ ID NO: 271, SEQ ID NO: 282, SEQ ID NO: 284, SEQ ID NO: 286, SEQ ID NO: 288, SEQ ID NO: 290, SEQ ID NO: 292, SEQ ID NO: 294, SEQ ID NO: 296, SEQ ID NO: 298, SEQ ID NO: 300, SEQ ID NO: 302, SEQ ID NO: 304, SEQ ID NO: 306, SEQ ID NO: 308, SEQ ID NO: 310, SEQ ID NO: 312, SEQ ID NO: 314, SEQ ID NO: 316, SEQ ID NO: 318, SEQ ID NO: 320, SEQ ID NO: 322, SEQ ID NO: 324, SEQ ID NO: 326, SEQ ID NO: 328, SEQ ID NO: 330, SEQ ID NO: 332, SEQ ID NO: 334, SEQ ID NO: 336, SEQ ID NO: 338, SEQ ID NO: 340, SEQ ID NO: 342, SEQ ID NO: 344, SEQ ID NO: 346, SEQ ID NO: 348, SEQ ID NO: 350, SEQ ID NO: 352, SEQ ID NO: 354, SEQ ID NO: 356, SEQ ID NO: 358, SEQ ID NO: 360, SEQ ID NO: 362, SEQ ID NO: 364, SEQ ID NO: 366, SEQ ID NO: 368, SEQ ID NO: 370, SEQ ID NO: 372, SEQ ID NO: 374, SEQ ID NO: 376, SEQ ID NO: 378, SEQ ID NO: 380, SEQ ID NO: 382, SEQ ID NO: 384, SEQ ID NO: 386, SEQ ID NO: 388, SEQ ID NO: 390, SEQ ID NO: 392, SEQ ID NO: 394, SEQ ID NO: 396, SEQ ID NO: 398, SEQ ID NO: 400, SEQ ID NO: 402, SEQ ID NO: 404, SEQ ID NO: 406, SEQ ID NO: 408, SEQ ID NO: 410, SEQ ID NO: 412, SEQ ID NO: 414, SEQ ID NO: 416, SEQ ID NO: 418, SEQ ID NO: 420, SEQ ID NO: 422, SEQ ID NO: 424, SEQ ID NO: 426, SEQ ID NO: 428, SEQ ID NO: 430, SEQ ID NO: 432, SEQ ID NO: 434 or SEQ ID NO: 440. In one embodiment, the nucleic acid molecule of the present invention is less than 100%, 99.999%, 99.99%, 99.9% or 99% identical to the sequence shown in SEQ ID NO: 1, SEQ ID NO: 3, SEQ ID NO: 5, SEQ ID NO: 7, SEQ ID NO: 9, SEQ ID NO: 11, SEQ ID NO: 13, SEQ ID NO: 15, SEQ ID NO: 19, SEQ ID NO: 21, SEQ ID NO: 23, SEQ ID NO: 25, SEQ ID NO: 27, SEQ ID NO: 29, SEQ ID NO: 31; SEQ ID NO: 64, SEQ ID NO: 66, SEQ ID NO: 68, SEQ ID NO: 70, SEQ ID NO: 72, SEQ ID NO: 74, SEQ ID NO: 76, SEQ ID NO: 78, SEQ ID NO: 80, SEQ ID NO: 82, SEQ ID NO: 84, SEQ ID NO: 86, SEQ ID NO: 88, SEQ ID NO: 90, SEQ ID NO: 92, SEQ ID NO: 94, SEQ ID NO: 96, SEQ ID NO: 98, SEQ ID NO: 100, SEQ ID NO: 102, SEQ ID NO: 104, SEQ ID NO: 106, SEQ ID NO: 108, SEQ ID NO: 110, SEQ ID NO: 112, SEQ ID NO: 114, SEQ ID NO: 116, SEQ ID NO: 118, SEQ ID NO: 120, SEQ ID NO: 122, SEQ ID NO: 124, SEQ ID NO: 126, SEQ ID NO: 128, SEQ ID NO: 130, SEQ ID NO: 132, SEQ ID NO: 134, SEQ ID NO: 136, SEQ ID NO: 138, SEQ ID NO: 140, SEQ ID NO: , SEQ ID NO: 142, SEQ ID NO: 151, SEQ ID NO: 153, SEQ ID NO: 155, SEQ ID NO: 157, SEQ ID NO: 159, SEQ ID NO: 161, SEQ ID NO: 163, SEQ ID NO: 165, SEQ ID NO: 167, SEQ ID NO: 169, SEQ ID NO: 171, SEQ ID NO: 173, SEQ ID NO: 175, SEQ ID NO: 177, SEQ ID NO: 179, SEQ ID NO: 181, SEQ ID NO: 183, SEQ ID NO: 185, SEQ ID NO: 187, SEQ ID NO: 189, SEQ ID NO: 191, SEQ ID NO: 193, SEQ ID NO: 195, SEQ ID NO: 197, SEQ ID NO: 199, SEQ ID NO: 201, SEQ ID NO: 203, SEQ ID NO: 205, SEQ ID NO: 207, SEQ ID NO: 209, SEQ ID NO: 211, SEQ ID NO: 213, SEQ ID NO: 215, SEQ ID NO: 217, SEQ ID NO: 219, SEQ ID NO: 228, SEQ ID NO: 230, SEQ ID NO: 232, SEQ ID NO: 234, SEQ ID NO: 236, SEQ ID NO: 238, SEQ ID NO: 240, SEQ ID NO: 242, SEQ ID NO: 249, SEQ ID NO: 251, SEQ ID NO: 253, SEQ ID NO: 255, SEQ ID NO: 257, SEQ ID NO: 259, SEQ ID NO: 261, SEQ ID NO: 263, SEQ ID NO: 265, SEQ ID NO: 267, SEQ ID NO: 269, SEQ ID NO: 271, SEQ ID NO: 282, SEQ ID NO: 284, SEQ ID NO: 286, SEQ ID NO: 288, SEQ ID NO: 290, SEQ ID NO: 292, SEQ ID NO: 294, SEQ ID NO: 296, SEQ ID NO: 298, SEQ ID NO: 300, SEQ ID NO: 302, SEQ ID NO: 304, SEQ ID NO: 306, SEQ ID NO: 308, SEQ ID NO: 310, SEQ ID NO: 312, SEQ ID NO: 314, SEQ ID NO: 316, SEQ ID NO: 318, SEQ ID NO: 320, SEQ ID NO: 322, SEQ ID NO: 324, SEQ ID NO: 326, SEQ ID NO: 328, SEQ ID NO: 330, SEQ ID NO: 332, SEQ ID NO: 334, SEQ ID NO: 336, SEQ ID NO: 338, SEQ ID NO: 340, SEQ ID NO: 342, SEQ ID NO: 344, SEQ ID NO: 346, SEQ ID NO: 348, SEQ ID NO: 350, SEQ ID NO: 352, SEQ ID NO: 354, SEQ ID NO: 356, SEQ ID NO: 358, SEQ ID NO: 360, SEQ ID NO: 362, SEQ ID NO: 364, SEQ ID NO: 366, SEQ ID NO: 368, SEQ ID NO: 370, SEQ ID NO: 372, SEQ ID NO: 374, SEQ ID NO: 376, SEQ ID NO: 378, SEQ ID NO: 380, SEQ ID NO: 382, SEQ ID NO: 384, SEQ ID NO: 386, SEQ ID NO: 388, SEQ ID NO: 390, SEQ ID NO: 392, SEQ ID NO: 394, SEQ ID NO: 396, SEQ ID NO: 398, SEQ ID NO: 400, SEQ ID NO: 402, SEQ ID NO: 404, SEQ ID NO: 406, SEQ ID NO: 408, SEQ ID NO: 410, SEQ ID NO: 412, SEQ ID NO: 414, SEQ ID NO: 416, SEQ ID NO: 418, SEQ ID NO: 420, SEQ ID NO: 422, SEQ ID NO: 424, SEQ ID NO: 426, SEQ ID NO: 428, SEQ ID NO: 430, SEQ ID NO: 432, SEQ ID NO: 434 or SEQ ID NO: 440. In another embodiment, the nucleic acid molecule does not consist of the sequence shown in SEQ ID NO: 1, SEQ ID NO: 3, SEQ ID NO: 5, SEQ ID NO: 7, SEQ ID NO: 9, SEQ ID NO: 11, SEQ ID NO: 13, SEQ ID NO: 15, SEQ ID NO: 19, SEQ ID NO: 21, SEQ ID NO: 23, SEQ ID NO: 25, SEQ ID NO: 27, SEQ ID NO: 29, SEQ ID NO: 31; SEQ ID NO: 64, SEQ ID NO: 66, SEQ ID NO: 68, SEQ ID NO: 70, SEQ ID NO: 72, SEQ ID NO: 74, SEQ ID NO: 76, SEQ ID NO: 78, SEQ ID NO: 80, SEQ ID NO: 82, SEQ ID NO: 84, SEQ ID NO: 86, SEQ ID NO: 88, SEQ ID NO: 90, SEQ ID NO: 92, SEQ ID NO: 94, SEQ ID NO: 96, SEQ ID NO: 98, SEQ ID NO: 100, SEQ ID NO: 102, SEQ ID NO: 104, SEQ ID NO: 106, SEQ ID NO: 108, SEQ ID NO: 110, SEQ ID NO: 112, SEQ ID NO: 114, SEQ ID NO: 116, SEQ ID NO: 118, SEQ ID NO: 120, SEQ ID NO: 122, SEQ ID NO: 124, SEQ ID NO: 126, SEQ ID NO: 128, SEQ ID NO: 130, SEQ ID NO: 132, SEQ ID NO: 134, SEQ ID NO: 136, SEQ ID NO: 138, SEQ ID NO: 140, SEQ ID NO: , SEQ ID NO: 142, SEQ ID NO: 151, SEQ ID NO: 153, SEQ ID NO: 155, SEQ ID NO: 157, SEQ ID NO: 159, SEQ ID NO: 161, SEQ ID NO: 163, SEQ ID NO: 165, SEQ ID NO: 167, SEQ ID NO: 169, SEQ ID NO: 171, SEQ ID NO: 173, SEQ ID NO: 175, SEQ ID NO: 177, SEQ ID NO: 179, SEQ ID NO: 181, SEQ ID NO: 183, SEQ ID NO: 185, SEQ ID NO: 187, SEQ ID NO: 189, SEQ ID NO: 191, SEQ ID NO: 193, SEQ ID NO: 195, SEQ ID NO: 197, SEQ ID NO: 199, SEQ ID NO: 201, SEQ ID NO: 203, SEQ ID NO: 205, SEQ ID NO: 207, SEQ ID NO: 209, SEQ ID NO: 211, SEQ ID NO: 213, SEQ ID NO: 215, SEQ ID NO: 217, SEQ ID NO: 219, SEQ ID NO: 228, SEQ ID NO: 230, SEQ ID NO: 232, SEQ ID NO: 234, SEQ ID NO: 236, SEQ ID NO: 238, SEQ ID NO: 240, SEQ ID NO: 242, SEQ ID NO: 249, SEQ ID NO: 251, SEQ ID NO: 253, SEQ ID NO: 255, SEQ ID NO: 257, SEQ ID NO: 259, SEQ ID NO: 261, SEQ ID NO: 263, SEQ ID NO: 265, SEQ ID NO: 267, SEQ ID NO: 269, SEQ ID NO: 271, SEQ ID NO: 282, SEQ ID NO: 284, SEQ ID NO: 286, SEQ ID NO: 288, SEQ ID NO: 290, SEQ ID NO: 292, SEQ ID NO: 294, SEQ ID NO: 296, SEQ ID NO: 298, SEQ ID NO: 300, SEQ ID NO: 302, SEQ ID NO: 304, SEQ ID NO: 306, SEQ ID NO: 308, SEQ ID NO: 310, SEQ ID NO: 312, SEQ ID NO: 314, SEQ ID NO: 316, SEQ ID NO: 318, SEQ ID NO: 320, SEQ ID NO: 322, SEQ ID NO: 324, SEQ ID NO: 326, SEQ ID NO: 328, SEQ ID NO: 330, SEQ ID NO: 332, SEQ ID NO: 334, SEQ ID NO: 336, SEQ ID NO: 338, SEQ ID NO: 340, SEQ ID NO: 342, SEQ ID NO: 344, SEQ ID NO: 346, SEQ ID NO: 348, SEQ ID NO: 350, SEQ ID NO: 352, SEQ ID NO: 354, SEQ ID NO: 356, SEQ ID NO: 358, SEQ ID NO: 360, SEQ ID NO: 362, SEQ ID NO: 364, SEQ ID NO: 366, SEQ ID NO: 368, SEQ ID NO: 370, SEQ ID NO: 372, SEQ ID NO: 374, SEQ ID NO: 376, SEQ ID NO: 378, SEQ ID NO: 380, SEQ ID NO: 382, SEQ ID NO: 384, SEQ ID NO: 386, SEQ ID NO: 388, SEQ ID NO: 390, SEQ ID NO: 392, SEQ ID NO: 394, SEQ ID NO: 396, SEQ ID NO: 398, SEQ ID NO: 400, SEQ ID NO: 402, SEQ ID NO: 404, SEQ ID NO: 406, SEQ ID NO: 408, SEQ ID NO: 410, SEQ ID NO: 412, SEQ ID NO: 414, SEQ ID NO: 416, SEQ ID NO: 418, SEQ ID NO: 420, SEQ ID NO: 422, SEQ ID NO: 424, SEQ ID NO: 426, SEQ ID NO: 428, SEQ ID NO: 430, SEQ ID NO: 432, SEQ ID NO: 434 or SEQ ID NO: 440.

[0219] Unless otherwise specified, the terms “polynucleotides”, “nucleic acid” and “nucleic acid molecule” are interchangeably in the present context. Unless otherwise specified, the terms “peptide”, “polypeptide” and “protein” are interchangeably in the present context. The term “sequence” may relate to polynucleotides, nucleic acids, nucleic acid molecules, peptides, polypeptides and proteins, depending on the context in which the term “sequence” is used. The terms “gene(s)”, “polynucleotide”, “nucleic acid sequence”, “nucleotide sequence”, or “nucleic acid molecule(s)” as used herein refers to a polymeric form of nucleotides of any length, either ribonucleotides or deoxyribonucleotides. The terms refer only to the primary structure of the molecule.

[0220] Thus, the terms “gene(s)”, “polynucleotide”, “nucleic acid sequence”, “nucleotide sequence”, or “nucleic acid molecule(s)” as used herein include double- and single-stranded DNA and RNA. They also include known types of modifications, for example, methylation, “caps”, substitutions of one or more of the naturally occurring nucleotides with an analog. Preferably, the DNA or RNA sequence of the invention comprises a coding sequence encoding the herein defined polypeptide.

[0221] A “coding sequence” is a nucleotide sequence, which is transcribed into mRNA and/or translated into a polypeptide when placed under the control of appropriate regulatory sequences. The boundaries of the coding sequence are determined by a translation start codon at the 5′-terminus and a translation stop codon at the 3′-terminus. A coding sequence can include, but is not limited to mRNA, cDNA, recombinant nucleotide sequences or genomic DNA, while introns may be present as well under certain circumstances.

[0222] Nucleic acid molecules with the sequence shown in SEQ ID NO: 1, SEQ ID NO: 3, SEQ ID NO: 5, SEQ ID NO: 7, SEQ ID NO: 9, SEQ ID NO: 11, SEQ ID NO: 13, SEQ ID NO: 15, SEQ ID NO: 19, SEQ ID NO: 21, SEQ ID NO: 23, SEQ ID NO: 25, SEQ ID NO: 27, SEQ ID NO: 29, SEQ ID NO: 31; SEQ ID NO: 64, SEQ ID NO: 66, SEQ ID NO: 68, SEQ ID NO: 70, SEQ ID NO: 72, SEQ ID NO: 74, SEQ ID NO: 76, SEQ ID NO: 78, SEQ ID NO: 80, SEQ ID NO: 82, SEQ ID NO: 84, SEQ ID NO: 86, SEQ ID NO: 88, SEQ ID NO: 90, SEQ ID NO: 92, SEQ ID NO: 94, SEQ ID NO: 96, SEQ ID NO: 98, SEQ ID NO: 100, SEQ ID NO: 102, SEQ ID NO: 104, SEQ ID NO: 106, SEQ ID NO: 108, SEQ ID NO: 110, SEQ ID NO: 112, SEQ ID NO: 114, SEQ ID NO: 116, SEQ ID NO: 118, SEQ ID NO: 120, SEQ ID NO: 122, SEQ ID NO: 124, SEQ ID NO: 126, SEQ ID NO: 128, SEQ ID NO: 130, SEQ ID NO: 132, SEQ ID NO: 134, SEQ ID NO: 136, SEQ ID NO: 138, SEQ ID NO: 140, SEQ ID NO: , SEQ ID NO: 142, SEQ ID NO: 151, SEQ ID NO: 153, SEQ ID NO: 155, SEQ ID NO: 157, SEQ ID NO: 159, SEQ ID NO: 161, SEQ ID NO: 163, SEQ ID NO: 165, SEQ ID NO: 167, SEQ ID NO: 169, SEQ ID NO: 171, SEQ ID NO: 173, SEQ ID NO: 175, SEQ ID NO: 177, SEQ ID NO: 179, SEQ ID NO: 181, SEQ ID NO: 183, SEQ ID NO: 185, SEQ ID NO: 187, SEQ ID NO: 189, SEQ ID NO: 191, SEQ ID NO: 193, SEQ ID NO: 195, SEQ ID NO: 197, SEQ ID NO: 199, SEQ ID NO: 201, SEQ ID NO: 203, SEQ ID NO: 205, SEQ ID NO: 207, SEQ ID NO: 209, SEQ ID NO: 211, SEQ ID NO: 213, SEQ ID NO: 215, SEQ ID NO: 217, SEQ ID NO: 219, SEQ ID NO: 228, SEQ ID NO: 230, SEQ ID NO: 232, SEQ ID NO: 234, SEQ ID NO: 236, SEQ ID NO: 238, SEQ ID NO: 240, SEQ ID NO: 242, SEQ ID NO: 249, SEQ ID NO: 251, SEQ ID NO: 253, SEQ ID NO: 255, SEQ ID NO: 257, SEQ ID NO: 259, SEQ ID NO: 261, SEQ ID NO: 263, SEQ ID NO: 265, SEQ ID NO: 267, SEQ ID NO: 269, SEQ ID NO: 271, SEQ ID NO: 282, SEQ ID NO: 284, SEQ ID NO: 286, SEQ ID NO: 288, SEQ ID NO: 290, SEQ ID NO: 292, SEQ ID NO: 294, SEQ ID NO: 296, SEQ ID NO: 298, SEQ ID NO: 300, SEQ ID NO: 302, SEQ ID NO: 304, SEQ ID NO: 306, SEQ ID NO: 308, SEQ ID NO: 310, SEQ ID NO: 312, SEQ ID NO: 314, SEQ ID NO: 316, SEQ ID NO: 318, SEQ ID NO: 320, SEQ ID NO: 322, SEQ ID NO: 324, SEQ ID NO: 326, SEQ ID NO: 328, SEQ ID NO: 330, SEQ ID NO: 332, SEQ ID NO: 334, SEQ ID NO: 336, SEQ ID NO: 338, SEQ ID NO: 340, SEQ ID NO: 342, SEQ ID NO: 344, SEQ ID NO: 346, SEQ ID NO: 348, SEQ ID NO: 350, SEQ ID NO: 352, SEQ ID NO: 354, SEQ ID NO: 356, SEQ ID NO: 358, SEQ ID NO: 360, SEQ ID NO: 362, SEQ ID NO: 364, SEQ ID NO: 366, SEQ ID NO: 368, SEQ ID NO: 370, SEQ ID NO: 372, SEQ ID NO: 374, SEQ ID NO: 376, SEQ ID NO: 378, SEQ ID NO: 380, SEQ ID NO: 382, SEQ ID NO: 384, SEQ ID NO: 386, SEQ ID NO: 388, SEQ ID NO: 390, SEQ ID NO: 392, SEQ ID NO: 394, SEQ ID NO: 396, SEQ ID NO: 398, SEQ ID NO: 400, SEQ ID NO: 402, SEQ ID NO: 404, SEQ ID NO: 406, SEQ ID NO: 408, SEQ ID NO: 410, SEQ ID NO: 412, SEQ ID NO: 414, SEQ ID NO: 416, SEQ ID NO: 418, SEQ ID NO: 420, SEQ ID NO: 422, SEQ ID NO: 424, SEQ ID NO: 426, SEQ ID NO: 428, SEQ ID NO: 430, SEQ ID NO: 432, SEQ ID NO: 434 or SEQ ID NO: 440 nucleic acid molecules which are derived from the amino acid sequences shown in SEQ ID NO: 2, SEQ ID NO: 4, SEQ ID NO: 6, SEQ ID NO: 8, SEQ ID NO: 10, SEQ ID NO: 12, SEQ ID NO: 14, SEQ ID NO: 16, SEQ ID NO: 20, SEQ ID NO: 22, SEQ ID NO: 24, SEQ ID NO: 26, SEQ ID NO: 28, SEQ ID NO. 30, SEQ ID NO: 32; SEQ ID NO: 65, SEQ ID NO: 67, SEQ ID NO: 69, SEQ ID NO: 71, SEQ ID NO: 73, SEQ ID NO: 75, SEQ ID NO: 77, SEQ ID NO: 79, SEQ ID NO: 81, SEQ ID NO: 83, SEQ ID NO: 85, SEQ ID NO: 87, SEQ ID NO: 89, SEQ ID NO: 91, SEQ ID NO: 93, SEQ ID NO: 95, SEQ ID NO: 97, SEQ ID NO: 99, SEQ ID NO: 101, SEQ ID NO: 103, SEQ ID NO: 105, SEQ ID NO: 107, SEQ ID NO: 109, SEQ ID NO: 111, SEQ ID NO: 113, SEQ ID NO: 115, SEQ ID NO: 117, SEQ ID NO: 119, SEQ ID NO: 121, SEQ ID NO: 123, SEQ ID NO: 125, SEQ ID NO: 127, SEQ ID NO: 129, SEQ ID NO: 131, SEQ ID NO: 133, SEQ ID NO: 135, SEQ ID NO: 137, SEQ ID NO: 139, SEQ ID NO: 141, SEQ ID NO: 143, SEQ ID NO: 152, SEQ ID NO: 154, SEQ ID NO: 156, SEQ ID NO: 158, SEQ ID NO: 160, SEQ ID NO: 162, SEQ ID NO: 164, SEQ ID NO: 166, SEQ ID NO: 168, SEQ ID NO: 170, SEQ ID NO: 172, SEQ ID NO: 174, SEQ ID NO: 176, SEQ ID NO: 178, SEQ ID NO: 180, SEQ ID NO: 182, SEQ ID NO: 184, SEQ ID NO: 186, SEQ ID NO: 188, SEQ ID NO: 190, SEQ ID NO: 192, SEQ ID NO: 194, SEQ ID NO: 196, SEQ ID NO: 198, SEQ ID NO: 200, SEQ ID NO: 202, SEQ ID NO: 204, SEQ ID NO: 206, SEQ ID NO: 208, SEQ ID NO: 210, SEQ ID NO: 212, SEQ ID NO: 214, SEQ ID NO: 216, SEQ ID NO: 218, SEQ ID NO: 220, SEQ ID NO: 229, SEQ ID NO:231, SEQ ID NO:233, SEQ ID NO: 235, SEQ ID NO: 237, SEQ ID NO: 239, SEQ ID NO: 241, SEQ ID NO: 243, SEQ ID NO: 250, SEQ ID NO: 252, SEQ ID NO: 254, SEQ ID NO: 256, SEQ ID NO: 258, SEQ ID NO: 260, SEQ ID NO: 262, SEQ ID NO: 264, SEQ ID NO: 266, SEQ ID NO: 268, SEQ ID NO: 270, SEQ ID NO: 272, SEQ ID NO: 283, SEQ ID NO: 285, SEQ ID NO: 287, SEQ ID NO: 289, SEQ ID NO: 291, SEQ ID NO: 293, SEQ ID NO: 295, SEQ ID NO: 297, SEQ ID NO: 299, SEQ ID NO: 301, SEQ ID NO: 303, SEQ ID NO: 305, SEQ ID NO: 307, SEQ ID NO: 309, SEQ ID NO: 311, SEQ ID NO: 313, SEQ ID NO: 315, SEQ ID NO: 317, SEQ ID NO: 319, SEQ ID NO: 321, SEQ ID NO: 323, SEQ ID NO: 325, SEQ ID NO: 327, SEQ ID NO: 329, SEQ ID NO: 331, SEQ ID NO: 333, SEQ ID NO: 335, SEQ ID NO: 337, SEQ ID NO: 339, SEQ ID NO: 341, SEQ ID NO: 343, SEQ ID NO: 345, SEQ ID NO: 347, SEQ ID NO: 349, SEQ ID NO: 351, SEQ ID NO: 353, SEQ ID NO: 355, SEQ ID NO: 357, SEQ ID NO: 359, SEQ ID NO: 361, SEQ ID NO: 363, SEQ ID NO: 365, SEQ ID NO: 367, SEQ ID NO: 369, SEQ ID NO: 371, SEQ ID NO: 373, SEQ ID NO: 375, SEQ ID NO: 377, SEQ ID NO: 379, SEQ ID NO: 381, SEQ ID NO: 383, SEQ ID NO: 385, SEQ ID NO: 387, SEQ ID NO: 389, SEQ ID NO: 391, SEQ ID NO: 393, SEQ ID NO: 395, SEQ ID NO: 397, SEQ ID NO: 399, SEQ ID NO: 401, SEQ ID NO: 403, SEQ ID NO: 405, SEQ ID NO: 407, SEQ ID NO: 409, SEQ ID NO: 411, SEQ ID NO: 413, SEQ ID NO: 415, SEQ ID NO: 417, SEQ ID NO: 419, SEQ ID NO: 421, SEQ ID NO: 423, SEQ ID NO: 425, SEQ ID NO: 427, SEQ ID NO: 429, SEQ ID NO: 431, SEQ ID NO: 433, SEQ ID NO: 435 or SEQ ID NO: 441 or their derivatives or homologues encoding polypeptides with the enzymatic or biological activity of protein of the invention or conferring the fine chemical increase after reducing, decreasing or deleting its expression or activity in the process according to the invention. These sequences are cloned in such a manner into nucleic acid constructs that their activity is reduced, decreased or deleted, either individually or in combination with other sequences involved in the biosynthesis of amino acids. These nucleic acid constructs enable an optimal synthesis of the amino acids produced in the process according to the invention.

[0223] Nucleic acid molecules, which are advantageous for the process according to the invention and which encode polypeptides with the biological activity represented by the protein of the invention and/or conferring the fine chemical increase can be determined from generally accessible databases. Those, which must be mentioned, in particular in this context are general gene databases such as the EMBL database (Stoesser G. et al., Nucleic Acids Res 2001, Vol. 29, 17-21), the GenBank database (Benson D. A. et al., Nucleic Acids Res 2000, Vol. 28, 15-18), or the PIR database (Barker W. C. et al., Nucleic Acids Res. 1999, Vol. 27, 39-43). It is furthermore possible to use organism-specific gene databases for determining advantageous sequences, in the case of yeast for example advantageously the SGD database (Cherry J. M. et al., Nucleic Acids Res. 1998, Vol. 26, 73-80) or the MIPS database (Mewes H. W. et al., Nucleic Acids Res. 1999, Vol. 27, 44-48), in the case of E. coli the GenProtEC database (http://web.bham.ac.uk/bcm4ght6/res.html), and in the case of Arabidopsis the TAIR-database (Huala, E. et al., Nucleic Acids Res. 2001 Vol. 29(1), 102-5) or the MIPS database.

[0224] The nucleic acid molecules used in the process according to the invention take the form of isolated nucleic acid sequences, which encode polypeptides with the biological activity of the protein of the invention enabling the fine chemical increase by reducing, decreasing or deleting their activity. The nucleic acid sequence(s) used in the process for the production of the fine chemical in transgenic organisms originate advantageously from an eukaryote but may also originate from a prokaryote or an archebacterium, thus it can derived from e.g. a microorganism, an animal or a plant.

[0225] For the purposes of the invention, as a rule the plural is intended to encompass the singular and vice versa.

[0226] In order to improve the introduction of the nucleic acid sequences and the reduction, decrease or deletion of the sequences in the transgenic organisms, which are used in the process, the nucleic acid sequences are incorporated into a nucleic acid construct and/or a vector in such a manner that they are reduced, decreased or deleted in respect to the biological activity either on the nucleic acid sequence expression level or on the level of the polypeptide or protein encoded by said sequences. In addition to the herein described sequences which are used in the process according to the invention, further nucleic acid sequences, advantageously of biosynthesis genes of the amino acid produced in the process according to the invention, may additionally be present in the nucleic acid construct or in the vector and may be introduced into the organism together. However, these additional sequences may also be introduced into the organisms via other, separate nucleic acid constructs or vectors.

[0227] Using the herein mentioned cloning vectors and transformation methods such as those which are published and cited in: Plant Molecular Biology and Biotechnology (CRC Press, Boca Raton, Fla.), chapter 6/7, pp. 71-119 (1993); F. F. White, Vectors for Gene Transfer in Higher Plants; in: Transgenic Plants, vol. 1, Engineering and Utilization, Ed.: Kung and R. Wu, Academic Press, 1993, 15-38; B. Jenes et al., Techniques for Gene Transfer, in: Transgenic Plants, vol. 1, Engineering and Utilization, Ed.: Kung and R. Wu, Academic Press (1993), 128-143; Potrykus, Annu. Rev. Plant Physiol. Plant Molec. Biol. 42 (1991), 205-225)) and further cited below, the nucleic acids may be used for the recombinant modification of a wide range of organisms, in particular prokaryotic or eukaryotic microorganisms or plants, so that they become a better and more efficient producer of the amino acids produced in the process according to the invention. This improved production, or production efficiency, of the amino acids or products derived there from, such as modified proteins, can be brought about by a direct effect of the manipulation or by an indirect effect of this manipulation.

[0228] In one embodiment, the nucleic acid molecule according to the invention originates from a plant, such as a plant selected from the families Aceraceae, Anacardiaceae, Apiaceae, Asteraceae, Brassicaceae, Cactaceae, Cucurbitaceae, Euphorbiaceae, Fabaceae, Malvaceae, Nymphaeaceae, Papaveraceae, Rosaceae, Salicaceae, Solanaceae, Arecaceae, Bromeliaceae, Cyperaceae, lridaceae, Liliaceae, Orchidaceae, Gentianaceae, Labiaceae, Magnoliaceae, Ranunculaceae, Carifolaceae, Rubiaceae, Scrophulariaceae, Caryophyllaceae, Ericaceae, Polygonaceae, Violaceae, Juncaceae or Poaceae and preferably from a plant selected from the group of the families Apiaceae, Asteraceae, Brassicaceae, Cucurbitaceae, Fabaceae, Papaveraceae, Rosaceae, Solanaceae, Liliaceae or Poaceae. Preferred are crop plants and in particular plants mentioned herein above as host plants such as the families and genera mentioned above for example preferred the species Anacardium occidentale, Calendula officinalis, Carthamus tinctorius, Cichoriurn intybus, Cynara scolymus, Helianthus annus, Tagetes lucida, Tagetes erecta, Tagetes tenuifolia; Daucus carota; Corylus avellana, Corylus colurna, Borago officinalis; Brassica napus, Brassica rapa ssp., Sinapis arvensis, Brassica juncea, Brassica juncea var. juncea, Brassica juncea var. crispifolia, Brassica juncea var. foliosa, Brassica nigra, Brassica sinapioides, Melanosinapis communis, Brassica oleracea, Arabidopsis thaliana, Anana comosus, Ananas ananas, Bromelia comosa, Carica papaya, Cannabis sative, Ipomoea batatus, Ipomoea pandurata, Convolvulus batatas, Convolvulus tiliaceus, Ipomoea fastigiata, Ipomoea tiliacea, Ipomoea triloba, Convolvulus panduratus, Beta vulgaris, Beta vulgaris var. altissima, Beta vulgaris var. vulgaris, Beta maritima, Beta vulgaris var. perennis, Beta vulgaris var. conditiva, Beta vulgaris var. esculenta, Cucurbita maxima, Cucurbita mixta, Cucurbita pepo, Cucurbita moschate, Olea europaea, Manihot utilissima, Janipha manihot, Jatropha manihot, Manihot aipil, Manihot dulcis, Manihot manihot, Manihot melanobasis, Manihot esculenta, Ricinus communis, Pisum sativum, Pisum arvense, Pisum humile, Medicago sativa, Medicago falcata, Medicago varia, Glycine max, Dolichos soja, Glycine gracilis, Glycine hispida, Phaseolus max, Soja hispida, Soja max, Cocos nucifera, Pelargonium grossularioides, Oleum cocoas, Laurus nobilis, Persea americana, Arachis hypogaea, Linum usitatissimum, Linum humile, Linum austriacum, Linum bienne, Linum angustifolium, Limmn catharticum, Linum flavum, Linum grandiflorum, Adenolinum grandiflorum, Linum lewisii, Linum narbonense, Linum perenne, Linum perenne var. lewisii, Linum pretense, Linum trigynum, Punica granatum, Gossypium hirsutum, Gossypium arboreum, Gossypium barbadense, Gossypium herbaceum, Gossypium thurberi, Musa nana, Musa acuminata, Musa paradisiacae Musa spp., Elaeis guineensis, Papaver orientale, Papaver rhoeas, Papaver dubium, Sesamum indicum, Piper aduncum, Piper amalago, Piper angustifolium, Piper auritum, Piper betel, Piper cubeba, Piper longum, Piper nigrum, Piper retrofractum, Artanthe adunca, Artanthe elongata, Peperomia elongata, Piper elongatum, Steffensia elongata, Hordeum vulgare, Hordeumfubatum, Hordeum murinum, Hordeum secalinum, Hordeum distichon Hordeum aegiceras, Hordeum hexastichon, Hordeum hexastichum, Hordeum irregulare, Hordeum sativum, Hordeum secalinum, Avena sativa, Avena fatua, Avena byzantina, Avena fatua var. sativa, Avena hybrida, Sorghum bicolor, Sorghum halepense, Sorghum saccharatum, Sorghum vulgare, Andropogon drummondi, Holcus bicolor, Holcus sorghum, Sorghum aethiopicum, Sorghum arundinaceum, Sorghum caffrorum, Sorghurn cernuum, Sorghum dochna, Sorghum drummondii, Sorghum durra, Sorghum guineense, Sorghum lanceolatum, Sorghum nervosum, Sorghum saccharatum, Sorghum subglabrescens, Sorghum verticilliflorum, Sorghum vulgare, Holcus halepensis, Sorghum miliaceum millet, Panicum militaceum, Zea mays, Triticum aestivum, Triticum durum, Triticum turgidum, Triticum hybemum, Triticum macha, Triticum sativum or Triticum vulgare, Cofea spp., Coffea arabica, Coffea canephora, Coffea liberica, Capsicum annuum, Capsicum annuum var. glabriusculum, Capsicum frutescens, Capsicum annuum, Nicotiana tabacum, Solanum tuberosum, Solarium melongena, Lycopersicon esculentum, Lycopersicon lycopersicum, Lycopersicon pyriforme, Solanum integrifolium, Solanum lycopersicum, Theobroma cacao or Camellia sinensis.

[0229] In one embodiment, the nucleic acid molecule sequence originates advantageously from a microorganism as mentioned above under host organism such as a fungus for example the genera Aspergillus, Penicillium or Claviceps or from yeasts such as the genera Pichia, Torulopsis, Hansenula, Schizosaccharomyces, Candida, Rhodotorula or Saccharomyces, very especially advantageously from the yeast of the family Saccharomycetaceae, such as the advantageous genus Saccharomyces and the very advantageous genus and species Saccharomyces cerevisiae for the production of the fine chemical in microorganisms. The skilled worker knows other suitable sources for the production of fine chemicals, which present also useful nucleic acid molecule sources. They include in general all prokaryotic or eukaryotic cells, preferably unicellular microorganisms, such as fungi like the genus Claviceps or Aspergillus or gram-positive bacteria such as the genera Bacillus, Corynebacterium, Micrococcus, Brevibacterium, Rhodococcus, Nocardia, Caseobacter or Arthrobacter or gram-negative bacteria such as the genera Escherichia, Flavobacterium or Salmonella, or yeasts such as the genera Rhodotorula, Hansenula or Candida.

[0230] Production strains which are especially advantageously selected in the process according to the invention are microorganisms selected from the group of the families Actinomycetaceae, Bacillaceae, Brevibacteriaceae, Corynebacteriaceae, Enterobacteriacae, Gordoniaceae, Micrococcaceae, Mycobacteriaceae, Nocardiaceae, Pseudomonaceae, Rhizobiaceae, Streptomycetaceae, Chaetomiaceae, Choanephoraceae, Cryptococcaceae, Cunninghamellaceae, Demetiaceae, Moniliaceae, Mortierellaceae, Mucoraceae, Pythiaceae, Sacharomycetaceae, Saprolegniaceae, Schizosacharomycetaceae, Sodariaceae, Sporobolomycetaceae, Tuberculariaceae, Adelotheciaceae, Dinophyceae, Ditrichaceae and Prasinophyceaeor of the genera and species consisting of Hansenula anomala, Candida utilis, Claviceps purpurea, Bacillus circulans, Bacillus subtilis, Bacillus sp., Brevibacterium albidum, Brevibacterium album, Brevibacterium cerinum, Brevibacterium flavum, Brevibacterium glutamigenes, Brevibacterium iodinum, Brevibacterium ketoglutamicum, Brevibacterium Jactofermentum, Brevibacterium linens, Brevibacterium roseum, Brevibacterium saccharolyticum, Brevibacterium sp., Corynebacterium acetoacidophilum, Corynebacterium acetoglutamicum, Corynebacterium ammoniagenes, Corynebacterium glutamicum (=Micrococcus glutamicum), Corynebacterium melassecola, Corynebacterium sp. or Escherichia coli, specifically Escherichia coli K12 and its described strains. All abovementioned organisms can in princible also function as host organisms.

[0231] However, it is also possible to use artificial sequences, which differ preferably in one or more bases from the nucleic acid sequences found in organisms, or in one or more amino acid molecules from polypeptide sequences found in organisms, and which mediate a polypeptide having above-mentioned activity, e.g. having the biological activity of the protein of the invention or conferring the fine chemical increase after reducing, decreasing or deleting its expression or activity.

[0232] In the process according to the invention nucleic acid sequences can be used, which if appropriate, contain synthetic, non-natural or modified nucleotide bases, which can be incorporated into DNA or RNA. Said synthetic, non-natural or modified bases can for example increase the stability of the nucleic acid molecule outside or inside a cell. The nucleic acid molecules of the invention can contain the same modifications as aforementioned.

[0233] As used in the present context the term “nucleic acid molecule” may also encompass the untranslated sequence located at the 3′ and at the 5′ end of the coding gene region, for example at least 500, preferably 200, especially preferably 100, nucleotides of the sequence upstream of the 5′ end of the coding region and at least 100, preferably 50, especially preferably 20, nucleotides of the sequence downstream of the 3′ end of the coding gene region. It is often advantageous only to choose the coding region for cloning and expression purposes. In the event for example the RNAi or antisense technology is used also the 5′- and/or 3′-regions can advantageously be used.

[0234] Preferably, the nucleic acid molecule used in the process according to the invention or the nucleic acid molecule of the invention is an isolated nucleic acid molecule.

[0235] An “isolated” polynucleotide or nucleic acid molecule is separated from other polynucleotides or nucleic acid molecules, which are present in the natural source of the nucleic acid molecule. An isolated nucleic acid molecule may be a chromosomal fragment of several kb, or preferably, a molecule only comprising the coding region of the gene. Accordingly, an isolated nucleic acid molecule of the invention may comprise chromosomal regions, which are adjacent 5′ and 3′ or further adjacent chromosomal regions, but preferably comprises no such sequences which naturally flank the nucleic acid molecule sequence in the genomic or chromosomal context in the organism from which the nucleic acid molecule originates (for example sequences which are adjacent to the regions encoding the 5′- and 3′-UTRs of the nucleic acid molecule). In various embodiments, the isolated nucleic acid molecule used in the process according to the invention may, for example comprise less than approximately 5 kb, 4 kb, 3 kb, 2 kb, 1 kb, 0.5 kb or 0.1 kb nucleotide sequences which naturally flank the nucleic acid molecule in the genomic DNA of the cell from which the nucleic acid molecule originates.

[0236] The nucleic acid molecules used in the process, for example a nucleic acid molecule with a nucleotide sequence of SEQ ID NO: 1, SEQ ID NO: 3, SEQ ID NO: 5, SEQ ID NO: 7, SEQ ID NO: 9, SEQ ID NO: 11, SEQ ID NO: 13, SEQ ID NO: 15, SEQ ID NO: 19, SEQ ID NO: 21, SEQ ID NO: 23, SEQ ID NO: 25, SEQ ID NO: 27, SEQ ID NO: 29, SEQ ID NO: 31; SEQ ID NO: 64, SEQ ID NO: 66, SEQ ID NO: 68, SEQ ID NO: 70, SEQ ID NO: 72, SEQ ID NO: 74, SEQ ID NO: 76, SEQ ID NO: 78, SEQ ID NO: 80, SEQ ID NO: 82, SEQ ID NO: 84, SEQ ID NO: 86, SEQ ID NO: 88, SEQ ID NO: 90, SEQ ID NO: 92, SEQ ID NO: 94, SEQ ID NO: 96, SEQ ID NO: 98, SEQ ID NO: 100, SEQ ID NO: 102, SEQ ID NO: 104, SEQ ID NO: 106, SEQ ID NO: 108, SEQ ID NO: 110, SEQ ID NO: 112, SEQ ID NO: 114, SEQ ID NO: 116, SEQ ID NO: 118, SEQ ID NO: 120, SEQ ID NO: 122, SEQ ID NO: 124, SEQ ID NO: 126, SEQ ID NO: 128, SEQ ID NO: 130, SEQ ID NO: 132, SEQ ID NO: 134, SEQ ID NO: 136, SEQ ID NO: 138, SEQ ID NO: 140, SEQ ID NO: , SEQ ID NO: 142, SEQ ID NO: 151, SEQ ID NO: 153, SEQ ID NO: 155, SEQ ID NO: 157, SEQ ID NO: 159, SEQ ID NO: 161, SEQ ID NO: 163, SEQ ID NO: 165, SEQ ID NO: 167, SEQ ID NO: 169, SEQ ID NO: 171, SEQ ID NO: 173, SEQ ID NO: 175, SEQ ID NO: 177, SEQ ID NO: 179, SEQ ID NO: 181, SEQ ID NO: 183, SEQ ID NO: 185, SEQ ID NO: 187, SEQ ID NO: 189, SEQ ID NO: 191, SEQ ID NO: 193, SEQ ID NO: 195, SEQ ID NO: 197, SEQ ID NO: 199, SEQ ID NO: 201, SEQ ID NO: 203, SEQ ID NO: 205, SEQ ID NO: 207, SEQ ID NO: 209, SEQ ID NO: 211, SEQ ID NO: 213, SEQ ID NO: 215, SEQ ID NO: 217, SEQ ID NO: 219, SEQ ID NO: 228, SEQ ID NO: 230, SEQ ID NO: 232, SEQ ID NO: 234, SEQ ID NO: 236, SEQ ID NO: 238, SEQ ID NO: 240, SEQ ID NO: 242, SEQ ID NO: 249, SEQ ID NO: 251, SEQ ID NO: 253, SEQ ID NO: 255, SEQ ID NO: 257, SEQ ID NO: 259, SEQ ID NO: 261, SEQ ID NO: 263, SEQ ID NO: 265, SEQ ID NO: 267, SEQ ID NO: 269, SEQ ID NO: 271, SEQ ID NO: 282, SEQ ID NO: 284, SEQ ID NO: 286, SEQ ID NO: 288, SEQ ID NO: 290, SEQ ID NO: 292, SEQ ID NO: 294, SEQ ID NO: 296, SEQ ID NO: 298, SEQ ID NO: 300, SEQ ID NO: 302, SEQ ID NO: 304, SEQ ID NO: 306, SEQ ID NO: 308, SEQ ID NO: 310, SEQ ID NO: 312, SEQ ID NO: 314, SEQ ID NO: 316, SEQ ID NO: 318, SEQ ID NO: 320, SEQ ID NO: 322, SEQ ID NO: 324, SEQ ID NO: 326, SEQ ID NO: 328, SEQ ID NO: 330, SEQ ID NO: 332, SEQ ID NO: 334, SEQ ID NO: 336, SEQ ID NO: 338, SEQ ID NO: 340, SEQ ID NO: 342, SEQ ID NO: 344, SEQ ID NO: 346, SEQ ID NO: 348, SEQ ID NO: 350, SEQ ID NO: 352, SEQ ID NO: 354, SEQ ID NO: 356, SEQ ID NO: 358, SEQ ID NO: 360, SEQ ID NO: 362, SEQ ID NO: 364, SEQ ID NO: 366, SEQ ID NO: 368, SEQ ID NO: 370, SEQ ID NO: 372, SEQ ID NO: 374, SEQ ID NO: 376, SEQ ID NO: 378, SEQ ID NO: 380, SEQ ID NO: 382, SEQ ID NO: 384, SEQ ID NO: 386, SEQ ID NO: 388, SEQ ID NO: 390, SEQ ID NO: 392, SEQ ID NO: 394, SEQ ID NO: 396, SEQ ID NO: 398, SEQ ID NO: 400, SEQ ID NO: 402, SEQ ID NO: 404, SEQ ID NO: 406, SEQ ID NO: 408, SEQ ID NO: 410, SEQ ID NO: 412, SEQ ID NO: 414, SEQ ID NO: 416, SEQ ID NO: 418, SEQ ID NO: 420, SEQ ID NO: 422, SEQ ID NO: 424, SEQ ID NO: 426, SEQ ID NO: 428, SEQ ID NO: 430, SEQ ID NO: 432, SEQ ID NO: 434 or SEQ ID NO: 440 or of a part thereof can be isolated using molecular-biological standard techniques and the sequence information provided herein. Also, for example a homologous sequence or homologous, conserved sequence regions at the DNA or amino acid level can be identified with the aid of comparison algorithms. The former can be used as hybridization probes under standard hybridization techniques (for example those described in Sambrook et al., Molecular Cloning: A Laboratory Manual. 2nd Ed., Cold Spring Harbor Laboratory, Cold Spring Harbor Laboratory Press, Cold Spring Harbor, N.Y., 1989) for isolating further nucleic acid sequences useful in this process. A nucleic acid molecule encompassing a complete sequence of SEQ ID NO: 1, SEQ ID NO: 3, SEQ ID NO: 5, SEQ ID NO: 7, SEQ ID NO: 9, SEQ ID NO: 11, SEQ ID NO: 13, SEQ ID NO: 15, SEQ ID NO: 19, SEQ ID NO: 21, SEQ ID NO: 23, SEQ ID NO: 25, SEQ ID NO: 27, SEQ ID NO: 29, SEQ ID NO: 31; SEQ ID NO: 64, SEQ ID NO: 66, SEQ ID NO: 68, SEQ ID NO: 70, SEQ ID NO: 72, SEQ ID NO: 74, SEQ ID NO: 76, SEQ ID NO: 78, SEQ ID NO: 80, SEQ ID NO: 82, SEQ ID NO: 84, SEQ ID NO: 86, SEQ ID NO: 88, SEQ ID NO: 90, SEQ ID NO: 92, SEQ ID NO: 94, SEQ ID NO: 96, SEQ ID NO: 98, SEQ ID NO: 100, SEQ ID NO: 102, SEQ ID NO: 104, SEQ ID NO: 106, SEQ ID NO: 108, SEQ ID NO: 110, SEQ ID NO: 112, SEQ ID NO: 114, SEQ ID NO: 116, SEQ ID NO: 118, SEQ ID NO: 120, SEQ ID NO: 122, SEQ ID NO: 124, SEQ ID NO: 126, SEQ ID NO: 128, SEQ ID NO: 130, SEQ ID NO: 132, SEQ ID NO: 134, SEQ ID NO: 136, SEQ ID NO: 138, SEQ ID NO: 140, SEQ ID NO: , SEQ ID NO: 142, SEQ ID NO: 151, SEQ ID NO: 153, SEQ ID NO: 155, SEQ ID NO: 157, SEQ ID NO: 159, SEQ ID NO: 161, SEQ ID NO: 163, SEQ ID NO: 165, SEQ ID NO: 167, SEQ ID NO: 169, SEQ ID NO: 171, SEQ ID NO: 173, SEQ ID NO: 175, SEQ ID NO: 177, SEQ ID NO: 179, SEQ ID NO: 181, SEQ ID NO: 183, SEQ ID NO: 185, SEQ ID NO: 187, SEQ ID NO: 189, SEQ ID NO: 191, SEQ ID NO: 193, SEQ ID NO: 195, SEQ ID NO: 197, SEQ ID NO: 199, SEQ ID NO: 201, SEQ ID NO: 203, SEQ ID NO: 205, SEQ ID NO: 207, SEQ ID NO: 209, SEQ ID NO: 211, SEQ ID NO: 213, SEQ ID NO: 215, SEQ ID NO: 217, SEQ ID NO: 219, SEQ ID NO: 228, SEQ ID NO: 230, SEQ ID NO: 232, SEQ ID NO: 234, SEQ ID NO: 236, SEQ ID NO: 238, SEQ ID NO: 240, SEQ ID NO: 242, SEQ ID NO: 249, SEQ ID NO: 251, SEQ ID NO: 253, SEQ ID NO: 255, SEQ ID NO: 257, SEQ ID NO: 259, SEQ ID NO: 261, SEQ ID NO: 263, SEQ ID NO: 265, SEQ ID NO: 267, SEQ ID NO: 269, SEQ ID NO: 271, SEQ ID NO: 282, SEQ ID NO: 284, SEQ ID NO: 286, SEQ ID NO: 288, SEQ ID NO: 290, SEQ ID NO: 292, SEQ ID NO: 294, SEQ ID NO: 296, SEQ ID NO: 298, SEQ ID NO: 300, SEQ ID NO: 302, SEQ ID NO: 304, SEQ ID NO: 306, SEQ ID NO: 308, SEQ ID NO: 310, SEQ ID NO: 312, SEQ ID NO: 314, SEQ ID NO: 316, SEQ ID NO: 318, SEQ ID NO: 320, SEQ ID NO: 322, SEQ ID NO: 324, SEQ ID NO: 326, SEQ ID NO: 328, SEQ ID NO: 330, SEQ ID NO: 332, SEQ ID NO: 334, SEQ ID NO: 336, SEQ ID NO: 338, SEQ ID NO: 340, SEQ ID NO: 342, SEQ ID NO: 344, SEQ ID NO: 346, SEQ ID NO: 348, SEQ ID NO: 350, SEQ ID NO: 352, SEQ ID NO: 354, SEQ ID NO: 356, SEQ ID NO: 358, SEQ ID NO: 360, SEQ ID NO: 362, SEQ ID NO: 364, SEQ ID NO: 366, SEQ ID NO: 368, SEQ ID NO: 370, SEQ ID NO: 372, SEQ ID NO: 374, SEQ ID NO: 376, SEQ ID NO: 378, SEQ ID NO: 380, SEQ ID NO: 382, SEQ ID NO: 384, SEQ ID NO: 386, SEQ ID NO: 388, SEQ ID NO: 390, SEQ ID NO: 392, SEQ ID NO: 394, SEQ ID NO: 396, SEQ ID NO: 398, SEQ ID NO: 400, SEQ ID NO: 402, SEQ ID NO: 404, SEQ ID NO: 406, SEQ ID NO: 408, SEQ ID NO: 410, SEQ ID NO: 412, SEQ ID NO: 414, SEQ ID NO: 416, SEQ ID NO: 418, SEQ ID NO: 420, SEQ ID NO: 422, SEQ ID NO: 424, SEQ ID NO: 426, SEQ ID NO: 428, SEQ ID NO: 430, SEQ ID NO: 432, SEQ ID NO: 434 or SEQ ID NO: 440 or a part thereof may additionally be isolated by polymerase chain reaction, oligonucleotide primers based on this sequence or on parts thereof being used. For example, a nucleic acid molecule comprising the complete sequence or part thereof can be isolated by polymerase chain reaction using oligonucleotide primers which have been generated on the basis of this very sequence. For example, mRNA can be isolated from cells [for example by means of the guanidinium thiocyanate extraction method of Chirgwin et al. (1979) Biochemistry 18:5294-5299] and cDNA can be generated by means of reverse transcriptase (for example Moloney MLV reverse transcriptase, available from Gibco/BRL, Bethesda, Md., or AMV reverse transcriptase, obtainable from Seikagaku America, Inc., St.Petersburg, Fla.). Synthetic oligonucleotide primers for the amplification by means of polymerase chain reaction can be generated on the basis of a sequence shown herein, for example the sequence shown in SEQ ID NO: 1, SEQ ID NO: 3, SEQ ID NO: 5, SEQ ID NO: 7, SEQ ID NO: 9, SEQ ID NO: 11, SEQ ID NO: 13, SEQ ID NO: 15, SEQ ID NO: 19, SEQ ID NO: 21, SEQ ID NO: 23, SEQ ID NO: 25, SEQ ID NO: 27, SEQ ID NO: 29, SEQ ID NO: 31; SEQ ID NO: 64, SEQ ID NO: 66, SEQ ID NO: 68, SEQ ID NO: 70, SEQ ID NO: 72, SEQ ID NO: 74, SEQ ID NO: 76, SEQ ID NO: 78, SEQ ID NO: 80, SEQ ID NO: 82, SEQ ID NO: 84, SEQ ID NO: 86, SEQ ID NO: 88, SEQ ID NO: 90, SEQ ID NO: 92, SEQ ID NO: 94, SEQ ID NO: 96, SEQ ID NO: 98, SEQ ID NO: 100, SEQ ID NO: 102, SEQ ID NO: 104, SEQ ID NO: 106, SEQ ID NO: 108, SEQ ID NO: 110, SEQ ID NO: 112, SEQ ID NO: 114, SEQ ID NO: 116, SEQ ID NO: 118, SEQ ID NO: 120, SEQ ID NO: 122, SEQ ID NO: 124, SEQ ID NO: 126, SEQ ID NO: 128, SEQ ID NO: 130, SEQ ID NO: 132, SEQ ID NO: 134, SEQ ID NO: 136, SEQ ID NO: 138, SEQ ID NO: 140, SEQ ID NO: , SEQ ID NO: 142, SEQ ID NO: 151, SEQ ID NO: 153, SEQ ID NO: 155, SEQ ID NO: 157, SEQ ID NO: 159, SEQ ID NO: 161, SEQ ID NO: 163, SEQ ID NO: 165, SEQ ID NO: 167, SEQ ID NO: 169, SEQ ID NO: 171, SEQ ID NO: 173, SEQ ID NO: 175, SEQ ID NO: 177, SEQ ID NO: 179, SEQ ID NO: 181, SEQ ID NO: 183, SEQ ID NO: 185, SEQ ID NO: 187, SEQ ID NO: 189, SEQ ID NO: 191, SEQ ID NO: 193, SEQ ID NO: 195, SEQ ID NO: 197, SEQ ID NO: 199, SEQ ID NO: 201, SEQ ID NO: 203, SEQ ID NO: 205, SEQ ID NO: 207, SEQ ID NO: 209, SEQ ID NO: 211, SEQ ID NO: 213, SEQ ID NO: 215, SEQ ID NO: 217, SEQ ID NO: 219, SEQ ID NO: 228, SEQ ID NO: 230, SEQ ID NO: 232, SEQ ID NO: 234, SEQ ID NO: 236, SEQ ID NO: 238, SEQ ID NO: 240, SEQ ID NO: 242, SEQ ID NO: 249, SEQ ID NO: 251, SEQ ID NO: 253, SEQ ID NO: 255, SEQ ID NO: 257, SEQ ID NO: 259, SEQ ID NO: 261, SEQ ID NO: 263, SEQ ID NO: 265, SEQ ID NO: 267, SEQ ID NO: 269, SEQ ID NO: 271, SEQ ID NO: 282, SEQ ID NO: 284, SEQ ID NO: 286, SEQ ID NO: 288, SEQ ID NO: 290, SEQ ID NO: 292, SEQ ID NO: 294, SEQ ID NO: 296, SEQ ID NO: 298, SEQ ID NO: 300, SEQ ID NO: 302, SEQ ID NO: 304, SEQ ID NO: 306, SEQ ID NO: 308, SEQ ID NO: 310, SEQ ID NO: 312, SEQ ID NO: 314, SEQ ID NO: 316, SEQ ID NO: 318, SEQ ID NO: 320, SEQ ID NO: 322, SEQ ID NO: 324, SEQ ID NO: 326, SEQ ID NO: 328, SEQ ID NO: 330, SEQ ID NO: 332, SEQ ID NO: 334, SEQ ID NO: 336, SEQ ID NO: 338, SEQ ID NO: 340, SEQ ID NO: 342, SEQ ID NO: 344, SEQ ID NO: 346, SEQ ID NO: 348, SEQ ID NO: 350, SEQ ID NO: 352, SEQ ID NO: 354, SEQ ID NO: 356, SEQ ID NO: 358, SEQ ID NO: 360, SEQ ID NO: 362, SEQ ID NO: 364, SEQ ID NO: 366, SEQ ID NO: 368, SEQ ID NO: 370, SEQ ID NO: 372, SEQ ID NO: 374, SEQ ID NO: 376, SEQ ID NO: 378, SEQ ID NO: 380, SEQ ID NO: 382, SEQ ID NO: 384, SEQ ID NO: 386, SEQ ID NO: 388, SEQ ID NO: 390, SEQ ID NO: 392, SEQ ID NO: 394, SEQ ID NO: 396, SEQ ID NO: 398, SEQ ID NO: 400, SEQ ID NO: 402, SEQ ID NO: 404, SEQ ID NO: 406, SEQ ID NO: 408, SEQ ID NO: 410, SEQ ID NO: 412, SEQ ID NO: 414, SEQ ID NO: 416, SEQ ID NO: 418, SEQ ID NO: 420, SEQ ID NO: 422, SEQ ID NO: 424, SEQ ID NO: 426, SEQ ID NO: 428, SEQ ID NO: 430, SEQ ID NO: 432, SEQ ID NO: 434 or SEQ ID NO: 440 or the sequences derived from SEQ ID NO: 2, SEQ ID NO: 4, SEQ ID NO: 6, SEQ ID NO: 8, SEQ ID NO: 10, SEQ ID NO: 12, SEQ ID NO: 14, SEQ ID NO: 16, SEQ ID NO: 20, SEQ ID NO: 22, SEQ ID NO: 24, SEQ ID NO: 26, SEQ ID NO: 28, SEQ ID NO. 30, SEQ ID NO: 32; SEQ ID NO: 65, SEQ ID NO: 67, SEQ ID NO: 69, SEQ ID NO: 71, SEQ ID NO: 73, SEQ ID NO: 75, SEQ ID NO: 77, SEQ ID NO: 79, SEQ ID NO: 81, SEQ ID NO: 83, SEQ ID NO: 85, SEQ ID NO: 87, SEQ ID NO: 89, SEQ ID NO: 91, SEQ ID NO: 93, SEQ ID NO: 95, SEQ ID NO: 97, SEQ ID NO: 99, SEQ ID NO: 101, SEQ ID NO: 103, SEQ ID NO: 105, SEQ ID NO: 107, SEQ ID NO: 109, SEQ ID NO: 111, SEQ ID NO: 113, SEQ ID NO: 115, SEQ ID NO: 117, SEQ ID NO: 119, SEQ ID NO: 121, SEQ ID NO: 123, SEQ ID NO: 125, SEQ ID NO: 127, SEQ ID NO: 129, SEQ ID NO: 131, SEQ ID NO: 133, SEQ ID NO: 135, SEQ ID NO: 137, SEQ ID NO: 139, SEQ ID NO: 141, SEQ ID NO: 143, SEQ ID NO: 152, SEQ ID NO: 154, SEQ ID NO: 156, SEQ ID NO: 158, SEQ ID NO: 160, SEQ ID NO: 162, SEQ ID NO: 164, SEQ ID NO: 166, SEQ ID NO: 168, SEQ ID NO: 170, SEQ ID NO: 172, SEQ ID NO: 174, SEQ ID NO: 176, SEQ ID NO: 178, SEQ ID NO: 180, SEQ ID NO: 182, SEQ ID NO: 184, SEQ ID NO: 186, SEQ ID NO: 188, SEQ ID NO: 190, SEQ ID NO: 192, SEQ ID NO: 194, SEQ ID NO: 196, SEQ ID NO: 198, SEQ ID NO: 200, SEQ ID NO: 202, SEQ ID NO: 204, SEQ ID NO: 206, SEQ ID NO: 208, SEQ ID NO: 210, SEQ ID NO: 212, SEQ ID NO: 214, SEQ ID NO: 216, SEQ ID NO: 218, SEQ ID NO: 220, SEQ ID NO: 229, SEQ ID NO:231, SEQ ID NO:233, SEQ ID NO: 235, SEQ ID NO: 237, SEQ ID NO: 239, SEQ ID NO: 241, SEQ ID NO: 243, SEQ ID NO: 250, SEQ ID NO: 252, SEQ ID NO: 254, SEQ ID NO: 256, SEQ ID NO: 258, SEQ ID NO: 260, SEQ ID NO: 262, SEQ ID NO: 264, SEQ ID NO: 266, SEQ ID NO: 268, SEQ ID NO: 270, SEQ ID NO: 272, SEQ ID NO: 283, SEQ ID NO: 285, SEQ ID NO: 287, SEQ ID NO: 289, SEQ ID NO: 291, SEQ ID NO: 293, SEQ ID NO: 295, SEQ ID NO: 297, SEQ ID NO: 299, SEQ ID NO: 301, SEQ ID NO: 303, SEQ ID NO: 305, SEQ ID NO: 307, SEQ ID NO: 309, SEQ ID NO: 311, SEQ ID NO: 313, SEQ ID NO: 315, SEQ ID NO: 317, SEQ ID NO: 319, SEQ ID NO: 321, SEQ ID NO: 323, SEQ ID NO: 325, SEQ ID NO: 327, SEQ ID NO: 329, SEQ ID NO: 331, SEQ ID NO: 333, SEQ ID NO: 335, SEQ ID NO: 337, SEQ ID NO: 339, SEQ ID NO: 341, SEQ ID NO: 343, SEQ ID NO: 345, SEQ ID NO: 347, SEQ ID NO: 349, SEQ ID NO: 351, SEQ ID NO: 353, SEQ ID NO: 355, SEQ ID NO: 357, SEQ ID NO: 359, SEQ ID NO: 361, SEQ ID NO: 363, SEQ ID NO: 365, SEQ ID NO: 367, SEQ ID NO: 369, SEQ ID NO: 371, SEQ ID NO: 373, SEQ ID NO: 375, SEQ ID NO: 377, SEQ ID NO: 379, SEQ ID NO: 381, SEQ ID NO: 383, SEQ ID NO: 385, SEQ ID NO: 387, SEQ ID NO: 389, SEQ ID NO: 391, SEQ ID NO: 393, SEQ ID NO: 395, SEQ ID NO: 397, SEQ ID NO: 399, SEQ ID NO: 401, SEQ ID NO: 403, SEQ ID NO: 405, SEQ ID NO: 407, SEQ ID NO: 409, SEQ ID NO: 411, SEQ ID NO: 413, SEQ ID NO: 415, SEQ ID NO: 417, SEQ ID NO: 419, SEQ ID NO: 421, SEQ ID NO: 423, SEQ ID NO: 425, SEQ ID NO: 427, SEQ ID NO: 429, SEQ ID NO: 431, SEQ ID NO: 433, SEQ ID NO: 435 or SEQ ID NO: 441. Such primers can be used to amplify nucleic acids sequences for example from cDNA libraries or from genomic libraries and identify nucleic acid molecules, which are useful in the inventive process and which have the biological activity represented by the protein as depicted in SEQ ID NO: 2, SEQ ID NO: 4, SEQ ID NO: 6, SEQ ID NO: 8, SEQ ID NO: 10, SEQ ID NO: 12, SEQ ID NO: 14, SEQ ID NO: 16, SEQ ID NO: 20, SEQ ID NO: 22, SEQ ID NO: 24, SEQ ID NO: 26, SEQ ID NO: 28, SEQ ID NO. 30, SEQ ID NO: 32; SEQ ID NO: 65, SEQ ID NO: 67, SEQ ID NO: 69, SEQ ID NO: 71, SEQ ID NO: 73, SEQ ID NO: 75, SEQ ID NO: 77, SEQ ID NO: 79, SEQ ID NO: 81, SEQ ID NO: 83, SEQ ID NO: 85, SEQ ID NO: 87, SEQ ID NO: 89, SEQ ID NO: 91, SEQ ID NO: 93, SEQ ID NO: 95, SEQ ID NO: 97, SEQ ID NO: 99, SEQ ID NO: 101, SEQ ID NO: 103, SEQ ID NO: 105, SEQ ID NO: 107, SEQ ID NO: 109, SEQ ID NO: 111, SEQ ID NO: 113, SEQ ID NO: 115, SEQ ID NO: 117, SEQ ID NO: 119, SEQ ID NO: 121, SEQ ID NO: 123, SEQ ID NO: 125, SEQ ID NO: 127, SEQ ID NO: 129, SEQ ID NO: 131, SEQ ID NO: 133, SEQ ID NO: 135, SEQ ID NO: 137, SEQ ID NO: 139, SEQ ID NO: 141, SEQ ID NO: 143, SEQ ID NO: 152, SEQ ID NO: 154, SEQ ID NO: 156, SEQ ID NO: 158, SEQ ID NO: 160, SEQ ID NO: 162, SEQ ID NO: 164, SEQ ID NO: 166, SEQ ID NO: 168, SEQ ID NO: 170, SEQ ID NO: 172, SEQ ID NO: 174, SEQ ID NO: 176, SEQ ID NO: 178, SEQ ID NO: 180, SEQ ID NO: 182, SEQ ID NO: 184, SEQ ID NO: 186, SEQ ID NO: 188, SEQ ID NO: 190, SEQ ID NO: 192, SEQ ID NO: 194, SEQ ID NO: 196, SEQ ID NO: 198, SEQ ID NO: 200, SEQ ID NO: 202, SEQ ID NO: 204, SEQ ID NO: 206, SEQ ID NO: 208, SEQ ID NO: 210, SEQ ID NO: 212, SEQ ID NO: 214, SEQ ID NO: 216, SEQ ID NO: 218, SEQ ID NO: 220, SEQ ID NO: 229, SEQ ID NO:231, SEQ ID NO:233, SEQ ID NO: 235, SEQ ID NO: 237, SEQ ID NO: 239, SEQ ID NO: 241, SEQ ID NO: 243, SEQ ID NO: 250, SEQ ID NO: 252, SEQ ID NO: 254, SEQ ID NO: 256, SEQ ID NO: 258, SEQ ID NO: 260, SEQ ID NO: 262, SEQ ID NO: 264, SEQ ID NO: 266, SEQ ID NO: 268, SEQ ID NO: 270, SEQ ID NO: 272, SEQ ID NO: 283, SEQ ID NO: 285, SEQ ID NO: 287, SEQ ID NO: 289, SEQ ID NO: 291, SEQ ID NO: 293, SEQ ID NO: 295, SEQ ID NO: 297, SEQ ID NO: 299, SEQ ID NO: 301, SEQ ID NO: 303, SEQ ID NO: 305, SEQ ID NO: 307, SEQ ID NO: 309, SEQ ID NO: 311, SEQ ID NO: 313, SEQ ID NO: 315, SEQ ID NO: 317, SEQ ID NO: 319, SEQ ID NO: 321, SEQ ID NO: 323, SEQ ID NO: 325, SEQ ID NO: 327, SEQ ID NO: 329, SEQ ID NO: 331, SEQ ID NO: 333, SEQ ID NO: 335, SEQ ID NO: 337, SEQ ID NO: 339, SEQ ID NO: 341, SEQ ID NO: 343, SEQ ID NO: 345, SEQ ID NO: 347, SEQ ID NO: 349, SEQ ID NO: 351, SEQ ID NO: 353, SEQ ID NO: 355, SEQ ID NO: 357, SEQ ID NO: 359, SEQ ID NO: 361, SEQ ID NO: 363, SEQ ID NO: 365, SEQ ID NO: 367, SEQ ID NO: 369, SEQ ID NO: 371, SEQ ID NO: 373, SEQ ID NO: 375, SEQ ID NO: 377, SEQ ID NO: 379, SEQ ID NO: 381, SEQ ID NO: 383, SEQ ID NO: 385, SEQ ID NO: 387, SEQ ID NO: 389, SEQ ID NO: 391, SEQ ID NO: 393, SEQ ID NO: 395, SEQ ID NO: 397, SEQ ID NO: 399, SEQ ID NO: 401, SEQ ID NO: 403, SEQ ID NO: 405, SEQ ID NO: 407, SEQ ID NO: 409, SEQ ID NO: 411, SEQ ID NO: 413, SEQ ID NO: 415, SEQ ID NO: 417, SEQ ID NO: 419, SEQ ID NO: 421, SEQ ID NO: 423, SEQ ID NO: 425, SEQ ID NO: 427, SEQ ID NO: 429, SEQ ID NO: 431, SEQ ID NO: 433, SEQ ID NO: 435 or SEQ ID NO: 441. Advantageously the primers as depicted in SEQ ID NO: 58, SEQ ID NO: 59, SEQ ID NO: 60, SEQ ID NO: 61, SEQ ID NO: 62, SEQ ID NO: 63, SEQ ID NO: 144, SEQ ID NO: 145, SEQ ID NO: 221, SEQ ID NO: 222, SEQ ID NO: 244, SEQ ID NO: 245, SEQ ID NO: 436 or SEQ ID NO: 437 are used (see Table 1).

TABLE 1
Preferred primers:

| | | | |
|---|---|---|---|
| | SEQ ID | | |
| Primer name | NO: | Sequence | Length_F/R |

| | | | |
|---|---|---|---|
| at2g25320_f | 58 | ATGAAGCAAAGCTCATCG | 21 |
| | | GAG | |
| at3g07610_f | 59 | ATGGATTCTGTGGAGGAAG | 22 |
| | | AAG | |
| at3g15600_f | 60 | ATGGGTATGTGGCTGTTAT | 22 |
| | | TTC | |
| at2g25320_r | 61 | TCATTCTTTTGTGTAGTC | 21 |
| | | TTC | |
| at3g07610_r | 62 | CTACATCTTCTCCATTTCTA | 23 |
| | | ATC | |
| at3g15600_r | 63 | TTAAACATTCTTCTTTGTCT | 23 |
| | | TTTTC | |
| At1g14490_f | 144 | ATGGAAACCGTCGGGCGTCC | 24 |
| | | ACGT | |
| At1g14490_r | 145 | TCAGTACGGCGATGGAGCT | 22 |
| | | TTG | |
| At1g30570_f | 221 | ATGTCGAAGCTGAGGAAA | 21 |
| | | AAG | |
| At1g30570_r | 222 | CTAAGCCGAATTGTGAAGAG | 20 |
| At2g21290_f | 244 | ATGGCGGCGATGCAGTGGT | 22 |
| | | GCG | |
| At2g2l290_r | 245 | TCAGATGAGCTTGAAAGGAA | 24 |
| | | GAGG | |
| At3g14230_f | 436 | ATGTGTGGAGGAGCTATA | 21 |
| | | ATC | |
| At3g14230_r | 437 | TCAAAAGTCTCCTTCCAGC | 22 |
| | | ATG | |

[0237] Moreover, it is possible to identify conserved regions from various organisms by carrying out protein sequence alignments with the polypeptide of the invention, in particular with the sequences of shown in SEQ ID NO: 2, SEQ ID NO: 4, SEQ ID NO: 6, SEQ ID NO: 8, SEQ ID NO: 10, SEQ ID NO: 12, SEQ ID NO: 14, SEQ ID NO: 16, SEQ ID NO: 20, SEQ ID NO: 22, SEQ ID NO: 24, SEQ ID NO: 26, SEQ ID NO: 28, SEQ ID NO. 30, SEQ ID NO: 32; SEQ ID NO: 65, SEQ ID NO: 67, SEQ ID NO: 69, SEQ ID NO: 71, SEQ ID NO: 73, SEQ ID NO: 75, SEQ ID NO: 77, SEQ ID NO: 79, SEQ ID NO: 81, SEQ ID NO: 83, SEQ ID NO: 85, SEQ ID NO: 87, SEQ ID NO: 89, SEQ ID NO: 91, SEQ ID NO: 93, SEQ ID NO: 95, SEQ ID NO: 97, SEQ ID NO: 99, SEQ ID NO: 101, SEQ ID NO: 103, SEQ ID NO: 105, SEQ ID NO: 107, SEQ ID NO: 109, SEQ ID NO: 111, SEQ ID NO: 113, SEQ ID NO: 115, SEQ ID NO: 117, SEQ ID NO: 119, SEQ ID NO: 121, SEQ ID NO: 123, SEQ ID NO: 125, SEQ ID NO: 127, SEQ ID NO: 129, SEQ ID NO: 131, SEQ ID NO: 133, SEQ ID NO: 135, SEQ ID NO: 137, SEQ ID NO: 139, SEQ ID NO: 141, SEQ ID NO: 143, SEQ ID NO: 152, SEQ ID NO: 154, SEQ ID NO: 156, SEQ ID NO: 158, SEQ ID NO: 160, SEQ ID NO: 162, SEQ ID NO: 164, SEQ ID NO: 166, SEQ ID NO: 168, SEQ ID NO: 170, SEQ ID NO: 172, SEQ ID NO: 174, SEQ ID NO: 176, SEQ ID NO: 178, SEQ ID NO: 180, SEQ ID NO: 182, SEQ ID NO: 184, SEQ ID NO: 186, SEQ ID NO: 188, SEQ ID NO: 190, SEQ ID NO: 192, SEQ ID NO: 194, SEQ ID NO: 196, SEQ ID NO: 198, SEQ ID NO: 200, SEQ ID NO: 202, SEQ ID NO: 204, SEQ ID NO: 206, SEQ ID NO: 208, SEQ ID NO: 210, SEQ ID NO: 212, SEQ ID NO: 214, SEQ ID NO: 216, SEQ ID NO: 218, SEQ ID NO: 220, SEQ ID NO: 229, SEQ ID NO:231, SEQ ID NO:233, SEQ ID NO: 235, SEQ ID NO: 237, SEQ ID NO: 239, SEQ ID NO: 241, SEQ ID NO: 243, SEQ ID NO: 250, SEQ ID NO: 252, SEQ ID NO: 254, SEQ ID NO: 256, SEQ ID NO: 258, SEQ ID NO: 260, SEQ ID NO: 262, SEQ ID NO: 264, SEQ ID NO: 266, SEQ ID NO: 268, SEQ ID NO: 270, SEQ ID NO: 272, SEQ ID NO: 283, SEQ ID NO: 285, SEQ ID NO: 287, SEQ ID NO: 289, SEQ ID NO: 291, SEQ ID NO: 293, SEQ ID NO: 295, SEQ ID NO: 297, SEQ ID NO: 299, SEQ ID NO: 301, SEQ ID NO: 303, SEQ ID NO: 305, SEQ ID NO: 307, SEQ ID NO: 309, SEQ ID NO: 311, SEQ ID NO: 313, SEQ ID NO: 315, SEQ ID NO: 317, SEQ ID NO: 319, SEQ ID NO: 321, SEQ ID NO: 323, SEQ ID NO: 325, SEQ ID NO: 327, SEQ ID NO: 329, SEQ ID NO: 331, SEQ ID NO: 333, SEQ ID NO: 335, SEQ ID NO: 337, SEQ ID NO: 339, SEQ ID NO: 341, SEQ ID NO: 343, SEQ ID NO: 345, SEQ ID NO: 347, SEQ ID NO: 349, SEQ ID NO: 351, SEQ ID NO: 353, SEQ ID NO: 355, SEQ ID NO: 357, SEQ ID NO: 359, SEQ ID NO: 361, SEQ ID NO: 363, SEQ ID NO: 365, SEQ ID NO: 367, SEQ ID NO: 369, SEQ ID NO: 371, SEQ ID NO: 373, SEQ ID NO: 375, SEQ ID NO: 377, SEQ ID NO: 379, SEQ ID NO: 381, SEQ ID NO: 383, SEQ ID NO: 385, SEQ ID NO: 387, SEQ ID NO: 389, SEQ ID NO: 391, SEQ ID NO: 393, SEQ ID NO: 395, SEQ ID NO: 397, SEQ ID NO: 399, SEQ ID NO: 401, SEQ ID NO: 403, SEQ ID NO: 405, SEQ ID NO: 407, SEQ ID NO: 409, SEQ ID NO: 411, SEQ ID NO: 413, SEQ ID NO: 415, SEQ ID NO: 417, SEQ ID NO: 419, SEQ ID NO: 421, SEQ ID NO: 423, SEQ ID NO: 425, SEQ ID NO: 427, SEQ ID NO: 429, SEQ ID NO: 431, SEQ ID NO: 433, SEQ ID NO: 435 or SEQ ID NO: 441 from which conserved regions, and in turn, degenerate primers can be derived. Such a conserved region for the polypeptide of the invention, in particular with the sequences of shown in SEQ ID NO: 33, SEQ ID NO: 34, SEQ ID NO: 146, SEQ ID NO: 147, SEQ ID NO: 148, SEQ ID NO: 149, SEQ ID NO: 150, SEQ ID NO: 223, SEQ ID NO: 224, SEQ ID NO: 225, SEQ ID NO: 226, SEQ ID NO: 227, SEQ ID NO: 246, SEQ ID NO: 247, SEQ ID NO: 248, SEQ ID NO: 273, SEQ ID NO: 274, SEQ ID NO: 275, SEQ ID NO: 276, SEQ ID NO: 277, SEQ ID NO: 278, SEQ ID NO: 279, SEQ ID NO: 280, SEQ ID NO: 281, SEQ ID NO: 438, SEQ ID NO: 439 or SEQ ID NO: 442. These degenerate primers can then be utilized by PCR for the amplification of fragments of novel coding regions coding for proteins having above-mentioned activity, e.g. conferring the increase of the fine chemical after reducing, decreasing or deleting the expression or activity of the respective nucleic acid sequence or the protein encoded by said sequence, which having the biological activity of the protein of the invention or further functional homologs of the polypeptide of the invention from other organisms.

[0238] These fragments can then be utilized as hybridization probe for isolating the complete gene sequence. As an alternative, the missing 5′ and 3′ sequences can be isolated by means of RACE-PCR. A nucleic acid molecule according to the invention can be amplified using cDNA or, as an alternative, genomic DNA as template and suitable oligonucleotide primers, following standard PCR amplification techniques. The nucleic acid molecule amplified thus can be cloned into a suitable vector and characterized by means of DNA sequence analysis. Oligonucleotides, which correspond to one of the nucleic acid molecules used in the process, can be generated by standard synthesis methods, for example using an automatic DNA synthesizer.

[0239] Nucleic acid molecules which are advantageously for the process according to the invention can be isolated based on their homology to the nucleic acid molecules disclosed herein using the sequences or part thereof as hybridization probe and following standard hybridization techniques under stringent hybridization conditions. In this context, it is possible to use, for example, isolated nucleic acid molecules of at least 15, 20, 25, 30, 35, 40, 50, 60 or more nucleotides, preferably of at least 15, 20 or 25 nucleotides in length which hybridize under stringent conditions with the above-described nucleic acid molecules, in particular with those which encompass a nucleotide sequence of SEQ ID NO: 1, SEQ ID NO: 3, SEQ ID NO: 5, SEQ ID NO: 7, SEQ ID NO: 9, SEQ ID NO: 11, SEQ ID NO: 13, SEQ ID NO: 15, SEQ ID NO: 19, SEQ ID NO: 21, SEQ ID NO: 23, SEQ ID NO: 25, SEQ ID NO: 27, SEQ ID NO: 29, SEQ ID NO: 31; SEQ ID NO: 64, SEQ ID NO: 66, SEQ ID NO: 68, SEQ ID NO: 70, SEQ ID NO: 72, SEQ ID NO: 74, SEQ ID NO: 76, SEQ ID NO: 78, SEQ ID NO: 80, SEQ ID NO: 82, SEQ ID NO: 84, SEQ ID NO: 86, SEQ ID NO: 88, SEQ ID NO: 90, SEQ ID NO: 92, SEQ ID NO: 94, SEQ ID NO: 96, SEQ ID NO: 98, SEQ ID NO: 100, SEQ ID NO: 102, SEQ ID NO: 104, SEQ ID NO: 106, SEQ ID NO: 108, SEQ ID NO: 110, SEQ ID NO: 112, SEQ ID NO: 114, SEQ ID NO: 116, SEQ ID NO: 118, SEQ ID NO: 120, SEQ ID NO: 122, SEQ ID NO: 124, SEQ ID NO: 126, SEQ ID NO: 128, SEQ ID NO: 130, SEQ ID NO: 132, SEQ ID NO: 134, SEQ ID NO: 136, SEQ ID NO: 138, SEQ ID NO: 140, SEQ ID NO: , SEQ ID NO: 142, SEQ ID NO: 151, SEQ ID NO: 153, SEQ ID NO: 155, SEQ ID NO: 157, SEQ ID NO: 159, SEQ ID NO: 161, SEQ ID NO: 163, SEQ ID NO: 165, SEQ ID NO: 167, SEQ ID NO: 169, SEQ ID NO: 171, SEQ ID NO: 173, SEQ ID NO: 175, SEQ ID NO: 177, SEQ ID NO: 179, SEQ ID NO: 181, SEQ ID NO: 183, SEQ ID NO: 185, SEQ ID NO: 187, SEQ ID NO: 189, SEQ ID NO: 191, SEQ ID NO: 193, SEQ ID NO: 195, SEQ ID NO: 197, SEQ ID NO: 199, SEQ ID NO: 201, SEQ ID NO: 203, SEQ ID NO: 205, SEQ ID NO: 207, SEQ ID NO: 209, SEQ ID NO: 211, SEQ ID NO: 213, SEQ ID NO: 215, SEQ ID NO: 217, SEQ ID NO: 219, SEQ ID NO: 228, SEQ ID NO: 230, SEQ ID NO: 232, SEQ ID NO: 234, SEQ ID NO: 236, SEQ ID NO: 238, SEQ ID NO: 240, SEQ ID NO: 242, SEQ ID NO: 249, SEQ ID NO: 251, SEQ ID NO: 253, SEQ ID NO: 255, SEQ ID NO: 257, SEQ ID NO: 259, SEQ ID NO: 261, SEQ ID NO: 263, SEQ ID NO: 265, SEQ ID NO: 267, SEQ ID NO: 269, SEQ ID NO: 271, SEQ ID NO: 282, SEQ ID NO: 284, SEQ ID NO: 286, SEQ ID NO: 288, SEQ ID NO: 290, SEQ ID NO: 292, SEQ ID NO: 294, SEQ ID NO: 296, SEQ ID NO: 298, SEQ ID NO: 300, SEQ ID NO: 302, SEQ ID NO: 304, SEQ ID NO: 306, SEQ ID NO: 308, SEQ ID NO: 310, SEQ ID NO: 312, SEQ ID NO: 314, SEQ ID NO: 316, SEQ ID NO: 318, SEQ ID NO: 320, SEQ ID NO: 322, SEQ ID NO: 324, SEQ ID NO: 326, SEQ ID NO: 328, SEQ ID NO: 330, SEQ ID NO: 332, SEQ ID NO: 334, SEQ ID NO: 336, SEQ ID NO: 338, SEQ ID NO: 340, SEQ ID NO: 342, SEQ ID NO: 344, SEQ ID NO: 346, SEQ ID NO: 348, SEQ ID NO: 350, SEQ ID NO: 352, SEQ ID NO: 354, SEQ ID NO: 356, SEQ ID NO: 358, SEQ ID NO: 360, SEQ ID NO: 362, SEQ ID NO: 364, SEQ ID NO: 366, SEQ ID NO: 368, SEQ ID NO: 370, SEQ ID NO: 372, SEQ ID NO: 374, SEQ ID NO: 376, SEQ ID NO: 378, SEQ ID NO: 380, SEQ ID NO: 382, SEQ ID NO: 384, SEQ ID NO: 386, SEQ ID NO: 388, SEQ ID NO: 390, SEQ ID NO: 392, SEQ ID NO: 394, SEQ ID NO: 396, SEQ ID NO: 398, SEQ ID NO: 400, SEQ ID NO: 402, SEQ ID NO: 404, SEQ ID NO: 406, SEQ ID NO: 408, SEQ ID NO: 410, SEQ ID NO: 412, SEQ ID NO: 414, SEQ ID NO: 416, SEQ ID NO: 418, SEQ ID NO: 420, SEQ ID NO: 422, SEQ ID NO: 424, SEQ ID NO: 426, SEQ ID NO: 428, SEQ ID NO: 430, SEQ ID NO: 432, SEQ ID NO: 434 or SEQ ID NO: 440. Nucleic acid molecules with 30, 50, 100, 250 or more nucleotides may also be used.

[0240] the term “homology” means that the respective nucleic acid molecules or encoded proteins are functionally and/or structurally equivalent. The nucleic acid molecules that are homologous to the nucleic acid molecules described above and that are derivatives of said nucleic acid molecules are, for example, variations of said nucleic acid molecules which represent modifications having the same biological function, in particular encoding proteins with the same or substantially the same biological function. They may be naturally occurring variations, such as sequences from other plant varieties or species, or mutations. These mutations may occur naturally or may be obtained by mutagenesis techniques. The allelic variations may be naturally occurring allelic variants as well as synthetically produced or genetically engineered variants. Structurally equivalents can for example be identified by testing the binding of said polypeptide to antibodies or computer based predictions. Structurally equivalent have the similar immunological characteristic, e.g. comprise similar epitopes.

[0241] By “hybridizing” it is meant that such nucleic acid molecules hybridize under conventional hybridization conditions, preferably under stringent conditions such as described by, e.g., Sambrook (Molecular Cloning; A Laboratory Manual, 2^{nd} Edition, Cold Spring Harbor Laboratory Press, Cold Spring Harbor, N.Y. (1989)) or in Current Protocols in Molecular Biology, John Wiley & Sons, N.Y. (1989), 6.3.1-6.3.6.

[0242] According to the invention, DNA as well as RNA molecules of the nucleic acid of the invention can be used as probes. Further, as template for the identification of functional homologues Northern blot assays as well as Southern blot assays can be performed. The Northern blot assay advantageously provides further informations about the expressed gene product: e.g. expression pattern, occurrence of processing steps, like splicing and capping, etc. The Southern blot assay provides additional information about the chromosomal localization and organization of the gene encoding the nucleic acid molecule of the invention.

[0243] A preferred, nonlimiting example of stringent Southern blot hydridization conditions are hybridizations in 6× sodium chloride/sodium citrate (=SSC) at approximately 45° C., followed by one or more wash steps in 0.2×SSC, 0.1% SDS at 50 to 65° C., for example at 50° C., 55° C. or 60° C. The skilled worker knows that these hybridization conditions differ as a function of the type of the nucleic acid and, for example when organic solvents are present, with regard to the temperature and concentration of the buffer. The temperature under “standard hybridization conditions” differs for example as a function of the type of the nucleic acid between 42° C. and 58° C., preferably between 45° C. and 50° C. in an aqueous buffer with a concentration of 0.1×0.5×, 1×, 2×, 3×, 4× or 5×SSC (pH 7.2). If organic solvent(s) is/are present in the abovementioned buffer, for example 50% formamide, the temperature under standard conditions is approximately 40° C., 42° C. or 45° C. The hybridization conditions for DNA:DNA hybrids are preferably for example 0.1×SSC and 20° C., 25° C., 30° C., 35° C., 40° C. or 45° C., preferably between 30° C. and 45° C. The hybridization conditions for DNA: RNA hybrids are preferably for example 0.1×SSC and 30° C., 35° C., 40° C., 45° C., 50° C. or 55° C., preferably between 45° C. and 55° C. The abovementioned hybridization temperatures are determined for example for a nucleic acid approximately 100 bp (=base pairs) in length and a G+C content of 50% in the absence of formamide. The skilled worker knows to determine the hybridization conditions required with the aid of textbooks, for example the ones mentioned above, or from the following textbooks: Sambrook et al., “Molecular Cloning”, Cold Spring Harbor Laboratory, 1989; Hames and Higgins (Ed.) 1985, “Nucleic Acids Hybridization: A Practical Approach”, IRL Press at Oxford University Press, Oxford; Brown (Ed.) 1991, “Essential Molecular Biology: A Practical Approach”, IRL Press at Oxford University Press, Oxford.

[0244] A further example of one such stringent hybridization condition is hybridization at 4×SSC at 65° C., followed by a washing in 0.1×SSC at 65° C. for one hour. Alternatively, an exemplary stringent hybridization condition is in 50% formamide, 4×SSC at 42° C. Further, the conditions during the wash step can be selected from the range of conditions delimited by low-stringency conditions (approximately 2×SSC at 50° C.) and high-stringency conditions (approximately 0.2×SSC at 50° C., preferably at 65° C.) (20×SSC: 0.3M sodium citrate, 3M NaCl, pH 7.0). In addition, the temperature during the wash step can be raised from low-stringency conditions at room temperature, approximately 22° C., to higher-stringency conditions at approximately 65° C. Both of the parameters salt concentration and temperature can be varied simultaneously, or else one of the two parameters can be kept constant while only the other is varied. Denaturants, for example formamide or SDS, may also be employed during the hybridization. In the presence of 50% formamide, hybridization is preferably effected at 42° C. Relevant factors like i) length of treatment, ii) salt conditions, iii) detergent conditions, iv) competitor DNAs, v) temperature and vi) probe selection can combined case by case so that not all possibilities can be mentioned herein.

[0245] Some examples of conditions for DNA hybridization (Southern blot assays) and wash step are shown hereinbelow:
[0246] (1) Hybridization conditions can be selected, for example, from the following conditions:
[0247] a) 4×SSC at 65° C.,
[0248] b) 6×SSC at 45° C.,
[0249] c) 6×SSC, 100 mg/ml denatured fragmented fish sperm DNA at 68° C.,
[0250] d) 6×SSC, 0.5% SDS, 100 mg/ml denatured salmon sperm DNA at 68° C.,
[0251] e) 6×SSC, 0.5% SDS, 100 mg/ml denatured fragmented salmon sperm DNA, 50% formamide at 42° C.,
[0252] f) 50% formamide, 4×SSC at 42° C.,
[0253] g) 50% (vol/vol) formamide, 0.1% bovine serum albumin, 0.1% Ficoll, 0.1% polyvinylpyrrolidone, 50 mM sodium phosphate buffer pH 6.5, 750 mM NaCl, 75 mM sodium citrate at 42° C.,
[0254] h) 2× or 4×SSC at 50° C. (low-stringency condition), or
[0255] i) 30 to 40% formamide, 2× or 4×SSC at 42° C. (low-stringency condition).
[0256] (2) Wash steps can be selected, for example, from the following conditions:
[0257] a) 0.015 M NaCl/0.0015 M sodium citrate/0.1% SDS at 50° C.
[0258] b) 0.1×SSC at 65° C.
[0259] c) 0.1×SSC, 0.5% SDS at 68° C.
[0260] d) 0.1×SSC, 0.5% SDS, 50% formamide at 42° C.
[0261] e) 0.2×SSC, 0.1% SDS at 42° C.
[0262] f) 2×SSC at 65° C. (low-stringency condition).
[0263] g) 0.2×SSC, 0.1% SDS at 60° C. (medium-high stringency conditions), or
[0264] h) 0.1×SSC, 0.1% SDS at 60° C. (medium-high stringency conditions), or
[0265] l) 0.2×SSC, 0.1% SDS at 65° C. (high stringency conditions), or
[0266] h) 0, 1×SSC, 0.1% SDS at 65° C. (high stringency conditions)

[0267] Polypeptides having above-mentioned activity, e.g. conferring the fine chemical increase, derived from other organisms, can be encoded by other DNA sequences, which hybridize to the sequences shown in SEQ ID NO: 1, SEQ ID NO: 3, SEQ ID NO: 5, SEQ ID NO: 7, SEQ ID NO: 9, SEQ ID NO: 11, SEQ ID NO: 13, SEQ ID NO: 15, SEQ ID NO: 19, SEQ ID NO: 21, SEQ ID NO: 23, SEQ ID NO: 25, SEQ ID NO: 27, SEQ ID NO: 29, SEQ ID NO: 31; SEQ ID NO: 64, SEQ ID NO: 66, SEQ ID NO: 68, SEQ ID NO: 70, SEQ ID NO: 72, SEQ ID NO: 74, SEQ ID NO: 76, SEQ ID NO: 78, SEQ ID NO: 80, SEQ ID NO: 82, SEQ ID NO: 84, SEQ ID NO: 86, SEQ ID NO: 88, SEQ ID NO: 90, SEQ ID NO: 92, SEQ ID NO: 94, SEQ ID NO: 96, SEQ ID NO: 98, SEQ ID NO: 100, SEQ ID NO: 102, SEQ ID NO: 104, SEQ ID NO: 106, SEQ ID NO: 108, SEQ ID NO: 110, SEQ ID NO: 112, SEQ ID NO: 114, SEQ ID NO: 116, SEQ ID NO: 118, SEQ ID NO: 120, SEQ ID NO: 122, SEQ ID NO: 124, SEQ ID NO: 126, SEQ ID NO: 128, SEQ ID NO: 130, SEQ ID NO: 132, SEQ ID NO: 134, SEQ ID NO: 136, SEQ ID NO: 138, SEQ ID NO: 140, SEQ ID NO: , SEQ ID NO: 142, SEQ ID NO: 151, SEQ ID NO: 153, SEQ ID NO: 155, SEQ ID NO: 157, SEQ ID NO: 159, SEQ ID NO: 161, SEQ ID NO: 163, SEQ ID NO: 165, SEQ ID NO: 167, SEQ ID NO: 169, SEQ ID NO: 171, SEQ ID NO: 173, SEQ ID NO: 175, SEQ ID NO: 177, SEQ ID NO: 179, SEQ ID NO: 181, SEQ ID NO: 183, SEQ ID NO: 185, SEQ ID NO: 187, SEQ ID NO: 189, SEQ ID NO: 191, SEQ ID NO: 193, SEQ ID NO: 195, SEQ ID NO: 197, SEQ ID NO: 199, SEQ ID NO: 201, SEQ ID NO: 203, SEQ ID NO: 205, SEQ ID NO: 207, SEQ ID NO: 209, SEQ ID NO: 211, SEQ ID NO: 213, SEQ ID NO: 215, SEQ ID NO: 217, SEQ ID NO: 219, SEQ ID NO: 228, SEQ ID NO: 230, SEQ ID NO: 232, SEQ ID NO: 234, SEQ ID NO: 236, SEQ ID NO: 238, SEQ ID NO: 240, SEQ ID NO: 242, SEQ ID NO: 249, SEQ ID NO: 251, SEQ ID NO: 253, SEQ ID NO: 255, SEQ ID NO: 257, SEQ ID NO: 259, SEQ ID NO: 261, SEQ ID NO: 263, SEQ ID NO: 265, SEQ ID NO: 267, SEQ ID NO: 269, SEQ ID NO: 271, SEQ ID NO: 282, SEQ ID NO: 284, SEQ ID NO: 286, SEQ ID NO: 288, SEQ ID NO: 290, SEQ ID NO: 292, SEQ ID NO: 294, SEQ ID NO: 296, SEQ ID NO: 298, SEQ ID NO: 300, SEQ ID NO: 302, SEQ ID NO: 304, SEQ ID NO: 306, SEQ ID NO: 308, SEQ ID NO: 310, SEQ ID NO: 312, SEQ ID NO: 314, SEQ ID NO: 316, SEQ ID NO: 318, SEQ ID NO: 320, SEQ ID NO: 322, SEQ ID NO: 324, SEQ ID NO: 326, SEQ ID NO: 328, SEQ ID NO: 330, SEQ ID NO: 332, SEQ ID NO: 334, SEQ ID NO: 336, SEQ ID NO: 338, SEQ ID NO: 340, SEQ ID NO: 342, SEQ ID NO: 344, SEQ ID NO: 346, SEQ ID NO: 348, SEQ ID NO: 350, SEQ ID NO: 352, SEQ ID NO: 354, SEQ ID NO: 356, SEQ ID NO: 358, SEQ ID NO: 360, SEQ ID NO: 362, SEQ ID NO: 364, SEQ ID NO: 366, SEQ ID NO: 368, SEQ ID NO: 370, SEQ ID NO: 372, SEQ ID NO: 374, SEQ ID NO: 376, SEQ ID NO: 378, SEQ ID NO: 380, SEQ ID NO: 382, SEQ ID NO: 384, SEQ ID NO: 386, SEQ ID NO: 388, SEQ ID NO: 390, SEQ ID NO: 392, SEQ ID NO: 394, SEQ ID NO: 396, SEQ ID NO: 398, SEQ ID NO: 400, SEQ ID NO: 402, SEQ ID NO: 404, SEQ ID NO: 406, SEQ ID NO: 408, SEQ ID NO: 410, SEQ ID NO: 412, SEQ ID NO: 414, SEQ ID NO: 416, SEQ ID NO: 418, SEQ ID NO: 420, SEQ ID NO: 422, SEQ ID NO: 424, SEQ ID NO: 426, SEQ ID NO: 428, SEQ ID NO: 430, SEQ ID NO: 432, SEQ ID NO: 434 or SEQ ID NO: 440 under relaxed hybridization conditions and which code on expression for peptides having the further biological activities of the protein of the invention.

[0268] Further, some applications have to be performed at low stringency hybridization conditions, without any consequences for the specificity of the hybridization. For example, a Southern blot analysis of total DNA could be probed with a nucleic acid molecule of the present invention and washed at low stringency (55° C. in 2×SSPE, 0.1% SDS). The hybridisation analysis could reveal a simple pattern of only genes encoding polypeptides of the present invention, e.g. having herein-mentioned fine chemical increasing activity and/or having also the biological activity of the protein of the invention. A further example of such low-stringent hybridization conditions is 4×SSC at 50° C. or hybridization with 30 to 40% formamide at 42° C. Such molecules comprise those which are fragments, analogues or derivatives of the polypeptide of the invention and differ, for example, by way of amino acid and/or nucleotide deletion(s), insertion(s), substitution (s), addition(s) and/or recombination (s) or any other modification(s) known in the art either alone or in combination from the above-described amino acid sequences or their underlying nucleotide sequence(s). However, it is preferred to use high stringency hybridisation conditions.

[0269] Hybridization should advantageously be carried out with fragments of at least 5, 10, 15, 20, 25, 30, 35 or 40 bp, advantageously at least 50, 60, 70 or 80 bp, preferably at least 90,100 or 110 bp. Most preferably are fragments of at least 15, 20, or 30 bp. Preferably are also hybridizations with at least 100 bp or 200, very especially preferably at least 400 bp in length. In an especially preferred embodiment, the hybridization should be carried out with the entire nucleic acid sequence with conditions described above.

[0270] The terms “fragment”, “fragment of a sequence” or “part of a sequence” mean a truncated sequence of the original sequence referred to. The truncated sequence (nucleic acid or protein sequence) can vary widely in length; the minimum size being a sequence of sufficient size to provide a sequence or sequence fragment with at least 15, 20, 21, 22, 23, 24, 25, 26, 27, 28, 29, 30 bp in length with at least 90, 91, 92, 93, 94, 95, 96, 97, 99 or 99% identity preferably 100% identity with a fragment of the nucleic acid molecules of the invention for example with the sequences shown in SEQ ID NO: 1, SEQ ID NO: 3, SEQ ID NO: 5, SEQ ID NO: 7, SEQ ID NO: 9, SEQ ID NO: 11, SEQ ID NO: 13, SEQ ID NO: is, SEQ ID NO: 19, SEQ ID NO: 21, SEQ ID NO: 23, SEQ ID NO: 25, SEQ ID NO: 27, SEQ ID NO: 29, SEQ ID NO: 31; SEQ ID NO: 64, SEQ ID NO: 66, SEQ ID NO: 68, SEQ ID NO: 70, SEQ ID NO: 72, SEQ ID NO: 74, SEQ ID NO: 76, SEQ ID NO: 78, SEQ ID NO: 80, SEQ ID NO: 82, SEQ ID NO: 84, SEQ ID NO: 86, SEQ ID NO: 88, SEQ ID NO: 90, SEQ ID NO: 92, SEQ ID NO: 94, SEQ ID NO: 96, SEQ ID NO: 98, SEQ ID NO: 100, SEQ ID NO: 102, SEQ ID NO: 104, SEQ ID NO: 106, SEQ ID NO: 108, SEQ ID NO: 110, SEQ ID NO: 112, SEQ ID NO: 114, SEQ ID NO: 116, SEQ ID NO: 118, SEQ ID NO: 120, SEQ ID NO: 122, SEQ ID NO: 124, SEQ ID NO: 126, SEQ ID NO: 128, SEQ ID NO: 130, SEQ ID NO: 132, SEQ ID NO: 134, SEQ ID NO: 136, SEQ ID NO: 138, SEQ ID NO: 140, SEQ ID NO: , SEQ ID NO: 142, SEQ ID NO: 151, SEQ ID NO: 153, SEQ ID NO: 155, SEQ ID NO: 157, SEQ ID NO: 159, SEQ ID NO: 161, SEQ ID NO: 163, SEQ ID NO: 165, SEQ ID NO: 167, SEQ ID NO: 169, SEQ ID NO: 171, SEQ ID NO: 173, SEQ ID NO: 175, SEQ ID NO: 177, SEQ ID NO: 179, SEQ ID NO: 181, SEQ ID NO: 183, SEQ ID NO: 185, SEQ ID NO: 187, SEQ ID NO: 189, SEQ ID NO: 191, SEQ ID NO: 193, SEQ ID NO: 195, SEQ ID NO: 197, SEQ ID NO: 199, SEQ ID NO: 201, SEQ ID NO: 203, SEQ ID NO: 205, SEQ ID NO: 207, SEQ ID NO: 209, SEQ ID NO: 211, SEQ ID NO: 213, SEQ ID NO: 215, SEQ ID NO: 217, SEQ ID NO: 219, SEQ ID NO: 228, SEQ ID NO: 230, SEQ ID NO: 232, SEQ ID NO: 234, SEQ ID NO: 236, SEQ ID NO: 238, SEQ ID NO: 240, SEQ ID NO: 242, SEQ ID NO: 249, SEQ ID NO: 251, SEQ ID NO: 253, SEQ ID NO: 255, SEQ ID NO: 257, SEQ ID NO: 259, SEQ ID NO: 261, SEQ ID NO: 263, SEQ ID NO: 265, SEQ ID NO: 267, SEQ ID NO: 269, SEQ ID NO: 271, SEQ ID NO: 282, SEQ ID NO: 284, SEQ ID NO: 286, SEQ ID NO: 288, SEQ ID NO: 290, SEQ ID NO: 292, SEQ ID NO: 294, SEQ ID NO: 296, SEQ ID NO: 298, SEQ ID NO: 300, SEQ ID NO: 302, SEQ ID NO: 304, SEQ ID NO: 306, SEQ ID NO: 308, SEQ ID NO: 310, SEQ ID NO: 312, SEQ ID NO: 314, SEQ ID NO: 316, SEQ ID NO: 318, SEQ ID NO: 320, SEQ ID NO: 322, SEQ ID NO: 324, SEQ ID NO: 326, SEQ ID NO: 328, SEQ ID NO: 330, SEQ ID NO: 332, SEQ ID NO: 334, SEQ ID NO: 336, SEQ ID NO: 338, SEQ ID NO: 340, SEQ ID NO: 342, SEQ ID NO: 344, SEQ ID NO: 346, SEQ ID NO: 348, SEQ ID NO: 350, SEQ ID NO: 352, SEQ ID NO: 354, SEQ ID NO: 356, SEQ ID NO: 358, SEQ ID NO: 360, SEQ ID NO: 362, SEQ ID NO: 364, SEQ ID NO: 366, SEQ ID NO: 368, SEQ ID NO: 370, SEQ ID NO: 372, SEQ ID NO: 374, SEQ ID NO: 376, SEQ ID NO: 378, SEQ ID NO: 380, SEQ ID NO: 382, SEQ ID NO: 384, SEQ ID NO: 386, SEQ ID NO: 388, SEQ ID NO: 390, SEQ ID NO: 392, SEQ ID NO: 394, SEQ ID NO: 396, SEQ ID NO: 398, SEQ ID NO: 400, SEQ ID NO: 402, SEQ ID NO: 404, SEQ ID NO: 406, SEQ ID NO: 408, SEQ ID NO: 410, SEQ ID NO: 412, SEQ ID NO: 414, SEQ ID NO: 416, SEQ ID NO: 418, SEQ ID NO: 420, SEQ ID NO: 422, SEQ ID NO: 424, SEQ ID NO: 426, SEQ ID NO: 428, SEQ ID NO: 430, SEQ ID NO: 432, SEQ ID NO: 434 or SEQ ID NO: 440. Said truncated sequences can as mentioned vary widely in length from 15 bp up to 2 kb or more, advantageously the sequences have a minimal length of 15, 20, 25, 30, 35 or 40 bp, while the maximum size is not critical. 100, 200, 300, 400, 500 or more base pair fragments can be used. In some applications, the maximum size usually is not substantially greater than that required to provide the complete gene function(s) of the nucleic acid sequences of the invention. Such sequences can advantageously been used for the repression, reduction, decrease or deletion of the biological activity of the nucleic acid molecules and/or proteins of the invention by for example the RNAi- or antisense-technology. For the reduction, decrease or deletion of the biological activity of the inventive nucleic acid sequence and/or the inventive protein also the promotor regions of the disclosed nucleic acid sequences can be used. The skilled worker knows how to clone said promotor regions.

[0271] Typically, the truncated amino acid sequence will range from about to about 310 amino acids in length. More typically, however, the sequence will be a maximum of about 250 amino acids in length, preferably a maximum of about 200 or 100 amino acids. It is usually desirable to select sequences of at least about 10, 12 or 15 amino acids, up to a maximum of about 20 or 25 amino acids.

[0272] The term “epitope” relates to specific immunoreactive sites within an antigen, also known as antigenic determinates. These epitopes can be a linear array of monomers in a polymeric composition—such as amino acids in a protein—or consist of or comprise a more complex secondary or tertiary structure. Those of skill will recognize that immunogens (i.e., substances capable of eliciting an immune response) are antigens; however, some antigen, such as haptens, are not immunogens but may be made immunogenic by coupling to a carrier molecule. The term “antigen” includes references to a substance to which an antibody can be generated and/or to which the antibody is specifically immunoreactive.

[0273] In one embodiment the present invention relates to an epitope of the polypeptide of the present invention.

[0274] The term “one or several amino acids” relates to at least one amino acid but not more than that number of amino acids, which would result in a homology of below 50% identity. Preferably, the identity is more than 70% or 80%, more preferred are 85%, 90%, 91%, 92%, 93%, 94% or 95%, even more preferred are 96%, 97%, 98%, or 99% identity.

[0275] Further, the nucleic acid molecule of the invention comprises a nucleic acid molecule, which is a complement of one of the nucleotide sequences of above mentioned nucleic acid molecules or a portion thereof. A nucleic acid molecule which is complementary to one of the nucleotide sequences shown in SEQ ID NO: 1, SEQ ID NO: 3, SEQ ID NO: 5, SEQ ID NO: 7, SEQ ID NO: 9, SEQ ID NO: 11, SEQ ID NO: 13, SEQ ID NO: 15, SEQ ID NO: 19, SEQ ID NO: 21, SEQ ID NO: 23, SEQ ID NO: 25, SEQ ID NO: 27, SEQ ID NO: 29, SEQ ID NO: 31; SEQ ID NO: 64, SEQ ID NO: 66, SEQ ID NO: 68, SEQ ID NO: 70, SEQ ID NO: 72, SEQ ID NO: 74, SEQ ID NO: 76, SEQ ID NO: 78, SEQ ID NO: 80, SEQ ID NO: 82, SEQ ID NO: 84, SEQ ID NO: 86, SEQ ID NO: 88, SEQ ID NO: 90, SEQ ID NO: 92, SEQ ID NO: 94, SEQ ID NO: 96, SEQ ID NO: 98, SEQ ID NO: 100, SEQ ID NO: 102, SEQ ID NO: 104, SEQ ID NO: 106, SEQ ID NO: 108, SEQ ID NO: 110, SEQ ID NO: 112, SEQ ID NO: 114, SEQ ID NO: 116, SEQ ID NO: 118, SEQ ID NO: 120, SEQ ID NO: 122, SEQ ID NO: 124, SEQ ID NO: 126, SEQ ID NO: 128, SEQ ID NO: 130, SEQ ID NO: 132, SEQ ID NO: 134, SEQ ID NO: 136, SEQ ID NO: 138, SEQ ID NO: 140, SEQ ID NO: , SEQ ID NO: 142, SEQ ID NO: 151, SEQ ID NO: 153, SEQ ID NO: 155, SEQ ID NO: 157, SEQ ID NO: 159, SEQ ID NO: 161, SEQ ID NO: 163, SEQ ID NO: 165, SEQ ID NO: 167, SEQ ID NO: 169, SEQ ID NO: 171, SEQ ID NO: 173, SEQ ID NO: 175, SEQ ID NO: 177, SEQ ID NO: 179, SEQ ID NO: 181, SEQ ID NO: 183, SEQ ID NO: 185, SEQ ID NO: 187, SEQ ID NO: 189, SEQ ID NO: 191, SEQ ID NO: 193, SEQ ID NO: 195, SEQ ID NO: 197, SEQ ID NO: 199, SEQ ID NO: 201, SEQ ID NO: 203, SEQ ID NO: 205, SEQ ID NO: 207, SEQ ID NO: 209, SEQ ID NO: 211, SEQ ID NO: 213, SEQ ID NO: 215, SEQ ID NO: 217, SEQ ID NO: 219, SEQ ID NO: 228, SEQ ID NO: 230, SEQ ID NO: 232, SEQ ID NO: 234, SEQ ID NO: 236, SEQ ID NO: 238, SEQ ID NO: 240, SEQ ID NO: 242, SEQ ID NO: 249, SEQ ID NO: 251, SEQ ID NO: 253, SEQ ID NO: 255, SEQ ID NO: 257, SEQ ID NO: 259, SEQ ID NO: 261, SEQ ID NO: 263, SEQ ID NO: 265, SEQ ID NO: 267, SEQ ID NO: 269, SEQ ID NO: 271, SEQ ID NO: 282, SEQ ID NO: 284, SEQ ID NO: 286, SEQ ID NO: 288, SEQ ID NO: 290, SEQ ID NO: 292, SEQ ID NO: 294, SEQ ID NO: 296, SEQ ID NO: 298, SEQ ID NO: 300, SEQ ID NO: 302, SEQ ID NO: 304, SEQ ID NO: 306, SEQ ID NO: 308, SEQ ID NO: 310, SEQ ID NO: 312, SEQ ID NO: 314, SEQ ID NO: 316, SEQ ID NO: 318, SEQ ID NO: 320, SEQ ID NO: 322, SEQ ID NO: 324, SEQ ID NO: 326, SEQ ID NO: 328, SEQ ID NO: 330, SEQ ID NO: 332, SEQ ID NO: 334, SEQ ID NO: 336, SEQ ID NO: 338, SEQ ID NO: 340, SEQ ID NO: 342, SEQ ID NO: 344, SEQ ID NO: 346, SEQ ID NO: 348, SEQ ID NO: 350, SEQ ID NO: 352, SEQ ID NO: 354, SEQ ID NO: 356, SEQ ID NO: 358, SEQ ID NO: 360, SEQ ID NO: 362, SEQ ID NO: 364, SEQ ID NO: 366, SEQ ID NO: 368, SEQ ID NO: 370, SEQ ID NO: 372, SEQ ID NO: 374, SEQ ID NO: 376, SEQ ID NO: 378, SEQ ID NO: 380, SEQ ID NO: 382, SEQ ID NO: 384, SEQ ID NO: 386, SEQ ID NO: 388, SEQ ID NO: 390, SEQ ID NO: 392, SEQ ID NO: 394, SEQ ID NO: 396, SEQ ID NO: 398, SEQ ID NO: 400, SEQ ID NO: 402, SEQ ID NO: 404, SEQ ID NO: 406, SEQ ID NO: 408, SEQ ID NO: 410, SEQ ID NO: 412, SEQ ID NO: 414, SEQ ID NO: 416, SEQ ID NO: 418, SEQ ID NO: 420, SEQ ID NO: 422, SEQ ID NO: 424, SEQ ID NO: 426, SEQ ID NO: 428, SEQ ID NO: 430, SEQ ID NO: 432, SEQ ID NO: 434 or SEQ ID NO: 440 is one which is sufficiently complementary to one of the nucleotide sequences shown in SEQ ID NO: 1, SEQ ID NO: 3, SEQ ID NO: 5, SEQ ID NO: 7, SEQ ID NO: 9, SEQ ID NO: 11, SEQ ID NO: 13, SEQ ID NO: 15, SEQ ID NO: 19, SEQ ID NO: 21, SEQ ID NO: 23, SEQ ID NO: 25, SEQ ID NO: 27, SEQ ID NO: 29, SEQ ID NO: 31; SEQ ID NO: 64, SEQ ID NO: 66, SEQ ID NO: 68, SEQ ID NO: 70, SEQ ID NO: 72, SEQ ID NO: 74, SEQ ID NO: 76, SEQ ID NO: 78, SEQ ID NO: 80, SEQ ID NO: 82, SEQ ID NO: 84, SEQ ID NO: 86, SEQ ID NO: 88, SEQ ID NO: 90, SEQ ID NO: 92, SEQ ID NO: 94, SEQ ID NO: 96, SEQ ID NO: 98, SEQ ID NO: 100, SEQ ID NO: 102, SEQ ID NO: 104, SEQ ID NO: 106, SEQ ID NO: 108, SEQ ID NO: 110, SEQ ID NO: 112, SEQ ID NO: 114, SEQ ID NO: 116, SEQ ID NO: 118, SEQ ID NO: 120, SEQ ID NO: 122, SEQ ID NO: 124, SEQ ID NO: 126, SEQ ID NO: 128, SEQ ID NO: 130, SEQ ID NO: 132, SEQ ID NO: 134, SEQ ID NO: 136, SEQ ID NO: 138, SEQ ID NO: 140, SEQ ID NO: , SEQ ID NO: 142, SEQ ID NO: 151, SEQ ID NO: 153, SEQ ID NO: 155, SEQ ID NO: 157, SEQ ID NO: 159, SEQ ID NO: 161, SEQ ID NO: 163, SEQ ID NO: 165, SEQ ID NO: 167, SEQ ID NO: 169, SEQ ID NO: 171, SEQ ID NO: 173, SEQ ID NO: 175, SEQ ID NO: 177, SEQ ID NO: 179, SEQ ID NO: 181, SEQ ID NO: 183, SEQ ID NO: 185, SEQ ID NO: 187, SEQ ID NO: 189, SEQ ID NO: 191, SEQ ID NO: 193, SEQ ID NO: 195, SEQ ID NO: 197, SEQ ID NO: 199, SEQ ID NO: 201, SEQ ID NO: 203, SEQ ID NO: 205, SEQ ID NO: 207, SEQ ID NO: 209, SEQ ID NO: 211, SEQ ID NO: 213, SEQ ID NO: 215, SEQ ID NO: 217, SEQ ID NO: 219, SEQ ID NO: 228, SEQ ID NO: 230, SEQ ID NO: 232, SEQ ID NO: 234, SEQ ID NO: 236, SEQ ID NO: 238, SEQ ID NO: 240, SEQ ID NO: 242, SEQ ID NO: 249, SEQ ID NO: 251, SEQ ID NO: 253, SEQ ID NO: 255, SEQ ID NO: 257, SEQ ID NO: 259, SEQ ID NO: 261, SEQ ID NO: 263, SEQ ID NO: 265, SEQ ID NO: 267, SEQ ID NO: 269, SEQ ID NO: 271, SEQ ID NO: 282, SEQ ID NO: 284, SEQ ID NO: 286, SEQ ID NO: 288, SEQ ID NO: 290, SEQ ID NO: 292, SEQ ID NO: 294, SEQ ID NO: 296, SEQ ID NO: 298, SEQ ID NO: 300, SEQ ID NO: 302, SEQ ID NO: 304, SEQ ID NO: 306, SEQ ID NO: 308, SEQ ID NO: 310, SEQ ID NO: 312, SEQ ID NO: 314, SEQ ID NO: 316, SEQ ID NO: 318, SEQ ID NO: 320, SEQ ID NO: 322, SEQ ID NO: 324, SEQ ID NO: 326, SEQ ID NO: 328, SEQ ID NO: 330, SEQ ID NO: 332, SEQ ID NO: 334, SEQ ID NO: 336, SEQ ID NO: 338, SEQ ID NO: 340, SEQ ID NO: 342, SEQ ID NO: 344, SEQ ID NO: 346, SEQ ID NO: 348, SEQ ID NO: 350, SEQ ID NO: 352, SEQ ID NO: 354, SEQ ID NO: 356, SEQ ID NO: 358, SEQ ID NO: 360, SEQ ID NO: 362, SEQ ID NO: 364, SEQ ID NO: 366, SEQ ID NO: 368, SEQ ID NO: 370, SEQ ID NO: 372, SEQ ID NO: 374, SEQ ID NO: 376, SEQ ID NO: 378, SEQ ID NO: 380, SEQ ID NO: 382, SEQ ID NO: 384, SEQ ID NO: 386, SEQ ID NO: 388, SEQ ID NO: 390, SEQ ID NO: 392, SEQ ID NO: 394, SEQ ID NO: 396, SEQ ID NO: 398, SEQ ID NO: 400, SEQ ID NO: 402, SEQ ID NO: 404, SEQ ID NO: 406, SEQ ID NO: 408, SEQ ID NO: 410, SEQ ID NO: 412, SEQ ID NO: 414, SEQ ID NO: 416, SEQ ID NO: 418, SEQ ID NO: 420, SEQ ID NO: 422, SEQ ID NO: 424, SEQ ID NO: 426, SEQ ID NO: 428, SEQ ID NO: 430, SEQ ID NO: 432, SEQ ID NO: 434 or SEQ ID NO: 440 such that it can hybridize to one of the nucleotide sequences shown in SEQ ID NO: 1, SEQ ID NO: 3, SEQ ID NO: 5, SEQ ID NO: 7, SEQ ID NO: 9, SEQ ID NO: 11, SEQ ID NO: 13, SEQ ID NO: 15, SEQ ID NO: 19, SEQ ID NO: 21, SEQ ID NO: 23, SEQ ID NO: 25, SEQ ID NO: 27, SEQ ID NO: 29, SEQ ID NO: 31; SEQ ID NO: 64, SEQ ID NO: 66, SEQ ID NO: 68, SEQ ID NO: 70, SEQ ID NO: 72, SEQ ID NO: 74, SEQ ID NO: 76, SEQ ID NO: 78, SEQ ID NO: 80, SEQ ID NO: 82, SEQ ID NO: 84, SEQ ID NO: 86, SEQ ID NO: 88, SEQ ID NO: 90, SEQ ID NO: 92, SEQ ID NO: 94, SEQ ID NO: 96, SEQ ID NO: 98, SEQ ID NO: 100, SEQ ID NO: 102, SEQ ID NO: 104, SEQ ID NO: 106, SEQ ID NO: 108, SEQ ID NO: 110, SEQ ID NO: 112, SEQ ID NO: 114, SEQ ID NO: 116, SEQ ID NO: 118, SEQ ID NO: 120, SEQ ID NO: 122, SEQ ID NO: 124, SEQ ID NO: 126, SEQ ID NO: 128, SEQ ID NO: 130, SEQ ID NO: 132, SEQ ID NO: 134, SEQ ID NO: 136, SEQ ID NO: 138, SEQ ID NO: 140, SEQ ID NO: , SEQ ID NO: 142, SEQ ID NO: 151, SEQ ID NO: 153, SEQ ID NO: 155, SEQ ID NO: 157, SEQ ID NO: 159, SEQ ID NO: 161, SEQ ID NO: 163, SEQ ID NO: 165, SEQ ID NO: 167, SEQ ID NO: 169, SEQ ID NO: 171, SEQ ID NO: 173, SEQ ID NO: 175, SEQ ID NO: 177, SEQ ID NO: 179, SEQ ID NO: 181, SEQ ID NO: 183, SEQ ID NO: 185, SEQ ID NO: 187, SEQ ID NO: 189, SEQ ID NO: 191, SEQ ID NO: 193, SEQ ID NO: 195, SEQ ID NO: 197, SEQ ID NO: 199, SEQ ID NO: 201, SEQ ID NO: 203, SEQ ID NO: 205, SEQ ID NO: 207, SEQ ID NO: 209, SEQ ID NO: 211, SEQ ID NO: 213, SEQ ID NO: 215, SEQ ID NO: 217, SEQ ID NO: 219, SEQ ID NO: 228, SEQ ID NO: 230, SEQ ID NO: 232, SEQ ID NO: 234, SEQ ID NO: 236, SEQ ID NO: 238, SEQ ID NO: 240, SEQ ID NO: 242, SEQ ID NO: 249, SEQ ID NO: 251, SEQ ID NO: 253, SEQ ID NO: 255, SEQ ID NO: 257, SEQ ID NO: 259, SEQ ID NO: 261, SEQ ID NO: 263, SEQ ID NO: 265, SEQ ID NO: 267, SEQ ID NO: 269, SEQ ID NO: 271, SEQ ID NO: 282, SEQ ID NO: 284, SEQ ID NO: 286, SEQ ID NO: 288, SEQ ID NO: 290, SEQ ID NO: 292, SEQ ID NO: 294, SEQ ID NO: 296, SEQ ID NO: 298, SEQ ID NO: 300, SEQ ID NO: 302, SEQ ID NO: 304, SEQ ID NO: 306, SEQ ID NO: 308, SEQ ID NO: 310, SEQ ID NO: 312, SEQ ID NO: 314, SEQ ID NO: 316, SEQ ID NO: 318, SEQ ID NO: 320, SEQ ID NO: 322, SEQ ID NO: 324, SEQ ID NO: 326, SEQ ID NO: 328, SEQ ID NO: 330, SEQ ID NO: 332, SEQ ID NO: 334, SEQ ID NO: 336, SEQ ID NO: 338, SEQ ID NO: 340, SEQ ID NO: 342, SEQ ID NO: 344, SEQ ID NO: 346, SEQ ID NO: 348, SEQ ID NO: 350, SEQ ID NO: 352, SEQ ID NO: 354, SEQ ID NO: 356, SEQ ID NO: 358, SEQ ID NO: 360, SEQ ID NO: 362, SEQ ID NO: 364, SEQ ID NO: 366, SEQ ID NO: 368, SEQ ID NO: 370, SEQ ID NO: 372, SEQ ID NO: 374, SEQ ID NO: 376, SEQ ID NO: 378, SEQ ID NO: 380, SEQ ID NO: 382, SEQ ID NO: 384, SEQ ID NO: 386, SEQ ID NO: 388, SEQ ID NO: 390, SEQ ID NO: 392, SEQ ID NO: 394, SEQ ID NO: 396, SEQ ID NO: 398, SEQ ID NO: 400, SEQ ID NO: 402, SEQ ID NO: 404, SEQ ID NO: 406, SEQ ID NO: 408, SEQ ID NO: 410, SEQ ID NO: 412, SEQ ID NO: 414, SEQ ID NO: 416, SEQ ID NO: 418, SEQ ID NO: 420, SEQ ID NO: 422, SEQ ID NO: 424, SEQ ID NO: 426, SEQ ID NO: 428, SEQ ID NO: 430, SEQ ID NO: 432, SEQ ID NO: 434 or SEQ ID NO: 440, thereby forming a stable duplex. Preferably, the hybridisation is performed under stringent hybridization conditions. However, a complement of one of the herein disclosed sequences is preferably a sequence complement thereto according to the base pairing of nucleic acid molecules well known to the skilled person. For example, the bases A and G undergo base pairing with the bases T and U or C, resp. and vice versa. Modifications of the bases can influence the base-pairing partner.

[0276] The nucleic acid molecule of the invention comprises a nucleotide sequence which is at least about 30%, 35%, 40% or 45%, preferably at least about 50%, 55%, 60% or 65%, more preferably at least about 70%, 80%, or 90%, and even more preferably at least about 95%, 97%, 98%, 99% or more homologous to a nucleotide sequence shown in SEQ ID NO: 1, SEQ ID NO: 3, SEQ ID NO: 5, SEQ ID NO: 7, SEQ ID NO: 9, SEQ ID NO: 11, SEQ ID NO: 13, SEQ ID NO: 15, SEQ ID NO: 19, SEQ ID NO: 21, SEQ ID NO: 23, SEQ ID NO: 25, SEQ ID NO: 27, SEQ ID NO: 29, SEQ ID NO: 31; SEQ ID NO: 64, SEQ ID NO: 66, SEQ ID NO: 68, SEQ ID NO: 70, SEQ ID NO: 72, SEQ ID NO: 74, SEQ ID NO: 76, SEQ ID NO: 78, SEQ ID NO: 80, SEQ ID NO: 82, SEQ ID NO: 84, SEQ ID NO: 86, SEQ ID NO: 88, SEQ ID NO: 90, SEQ ID NO: 92, SEQ ID NO: 94, SEQ ID NO: 96, SEQ ID NO: 98, SEQ ID NO: 100, SEQ ID NO: 102, SEQ ID NO: 104, SEQ ID NO: 106, SEQ ID NO: 108, SEQ ID NO: 110, SEQ ID NO: 112, SEQ ID NO: 114, SEQ ID NO: 116, SEQ ID NO: 118, SEQ ID NO: 120, SEQ ID NO: 122, SEQ ID NO: 124, SEQ ID NO: 126, SEQ ID NO: 128, SEQ ID NO: 130, SEQ ID NO: 132, SEQ ID NO: 134, SEQ ID NO: 136, SEQ ID NO: 138, SEQ ID NO: 140, SEQ ID NO: , SEQ ID NO: 142, SEQ ID NO: 151, SEQ ID NO: 153, SEQ ID NO: 155, SEQ ID NO: 157, SEQ ID NO: 159, SEQ ID NO: 161, SEQ ID NO: 163, SEQ ID NO: 165, SEQ ID NO: 167, SEQ ID NO: 169, SEQ ID NO: 171, SEQ ID NO: 173, SEQ ID NO: 175, SEQ ID NO: 177, SEQ ID NO: 179, SEQ ID NO: 181, SEQ ID NO: 183, SEQ ID NO: 185, SEQ ID NO: 187, SEQ ID NO: 189, SEQ ID NO: 191, SEQ ID NO: 193, SEQ ID NO: 195, SEQ ID NO: 197, SEQ ID NO: 199, SEQ ID NO: 201, SEQ ID NO: 203, SEQ ID NO: 205, SEQ ID NO: 207, SEQ ID NO: 209, SEQ ID NO: 211, SEQ ID NO: 213, SEQ ID NO: 215, SEQ ID NO: 217, SEQ ID NO: 219, SEQ ID NO: 228, SEQ ID NO: 230, SEQ ID NO: 232, SEQ ID NO: 234, SEQ ID NO: 236, SEQ ID NO: 238, SEQ ID NO: 240, SEQ ID NO: 242, SEQ ID NO: 249, SEQ ID NO: 251, SEQ ID NO: 253, SEQ ID NO: 255, SEQ ID NO: 257, SEQ ID NO: 259, SEQ ID NO: 261, SEQ ID NO: 263, SEQ ID NO: 265, SEQ ID NO: 267, SEQ ID NO: 269, SEQ ID NO: 271, SEQ ID NO: 282, SEQ ID NO: 284, SEQ ID NO: 286, SEQ ID NO: 288, SEQ ID NO: 290, SEQ ID NO: 292, SEQ ID NO: 294, SEQ ID NO: 296, SEQ ID NO: 298, SEQ ID NO: 300, SEQ ID NO: 302, SEQ ID NO: 304, SEQ ID NO: 306, SEQ ID NO: 308, SEQ ID NO: 310, SEQ ID NO: 312, SEQ ID NO: 314, SEQ ID NO: 316, SEQ ID NO: 318, SEQ ID NO: 320, SEQ ID NO: 322, SEQ ID NO: 324, SEQ ID NO: 326, SEQ ID NO: 328, SEQ ID NO: 330, SEQ ID NO: 332, SEQ ID NO: 334, SEQ ID NO: 336, SEQ ID NO: 338, SEQ ID NO: 340, SEQ ID NO: 342, SEQ ID NO: 344, SEQ ID NO: 346, SEQ ID NO: 348, SEQ ID NO: 350, SEQ ID NO: 352, SEQ ID NO: 354, SEQ ID NO: 356, SEQ ID NO: 358, SEQ ID NO: 360, SEQ ID NO: 362, SEQ ID NO: 364, SEQ ID NO: 366, SEQ ID NO: 368, SEQ ID NO: 370, SEQ ID NO: 372, SEQ ID NO: 374, SEQ ID NO: 376, SEQ ID NO: 378, SEQ ID NO: 380, SEQ ID NO: 382, SEQ ID NO: 384, SEQ ID NO: 386, SEQ ID NO: 388, SEQ ID NO: 390, SEQ ID NO: 392, SEQ ID NO: 394, SEQ ID NO: 396, SEQ ID NO: 398, SEQ ID NO: 400, SEQ ID NO: 402, SEQ ID NO: 404, SEQ ID NO: 406, SEQ ID NO: 408, SEQ ID NO: 410, SEQ ID NO: 412, SEQ ID NO: 414, SEQ ID NO: 416, SEQ ID NO: 418, SEQ ID NO: 420, SEQ ID NO: 422, SEQ ID NO: 424, SEQ ID NO: 426, SEQ ID NO: 428, SEQ ID NO: 430, SEQ ID NO: 432, SEQ ID NO: 434 or SEQ ID NO: 440, or a portion thereof and/or has the biological activity of the protein of the invention or the nucleic acid molecule encoding said protein. The nucleic acid molecule of the invention comprises a nucleotide sequence which hybridizes, preferably hybridizes under stringent conditions as defined herein, to one of the nucleotide sequences shown in SEQ ID NO: 1, SEQ ID NO: 3, SEQ ID NO: 5, SEQ ID NO: 7, SEQ ID NO: 9, SEQ ID NO: 11, SEQ ID NO: 13, SEQ ID NO: 15, SEQ ID NO: 19, SEQ ID NO: 21, SEQ ID NO: 23, SEQ ID NO: 25, SEQ ID NO: 27, SEQ ID NO: 29, SEQ ID NO: 31; SEQ ID NO: 64, SEQ ID NO: 66, SEQ ID NO: 68, SEQ ID NO: 70, SEQ ID NO: 72, SEQ ID NO: 74, SEQ ID NO: 76, SEQ ID NO: 78, SEQ ID NO: 80, SEQ ID NO: 82, SEQ ID NO: 84, SEQ ID NO: 86, SEQ ID NO: 88, SEQ ID NO: 90, SEQ ID NO: 92, SEQ ID NO: 94, SEQ ID NO: 96, SEQ ID NO: 98, SEQ ID NO: 100, SEQ ID NO: 102, SEQ ID NO: 104, SEQ ID NO: 106, SEQ ID NO: 108, SEQ ID NO: 110, SEQ ID NO: 112, SEQ ID NO: 114, SEQ ID NO: 116, SEQ ID NO: 118, SEQ ID NO: 120, SEQ ID NO: 122, SEQ ID NO: 124, SEQ ID NO: 126, SEQ ID NO: 128, SEQ ID NO: 130, SEQ ID NO: 132, SEQ ID NO: 134, SEQ ID NO: 136, SEQ ID NO: 138, SEQ ID NO: 140, SEQ ID NO: , SEQ ID NO: 142, SEQ ID NO: 151, SEQ ID NO: 153, SEQ ID NO: 155, SEQ ID NO: 157, SEQ ID NO: 159, SEQ ID NO: 161, SEQ ID NO: 163, SEQ ID NO: 165, SEQ ID NO: 167, SEQ ID NO: 169, SEQ ID NO: 171, SEQ ID NO: 173, SEQ ID NO: 175, SEQ ID NO: 177, SEQ ID NO: 179, SEQ ID NO: 181, SEQ ID NO: 183, SEQ ID NO: 185, SEQ ID NO: 187, SEQ ID NO: 189, SEQ ID NO: 191, SEQ ID NO: 193, SEQ ID NO: 195, SEQ ID NO: 197, SEQ ID NO: 199, SEQ ID NO: 201, SEQ ID NO: 203, SEQ ID NO: 205, SEQ ID NO: 207, SEQ ID NO: 209, SEQ ID NO: 211, SEQ ID NO: 213, SEQ ID NO: 215, SEQ ID NO: 217, SEQ ID NO: 219, SEQ ID NO: 228, SEQ ID NO: 230, SEQ ID NO: 232, SEQ ID NO: 234, SEQ ID NO: 236, SEQ ID NO: 238, SEQ ID NO: 240, SEQ ID NO: 242, SEQ ID NO: 249, SEQ ID NO: 251, SEQ ID NO: 253, SEQ ID NO: 255, SEQ ID NO: 257, SEQ ID NO: 259, SEQ ID NO: 261, SEQ ID NO: 263, SEQ ID NO: 265, SEQ ID NO: 267, SEQ ID NO: 269, SEQ ID NO: 271, SEQ ID NO: 282, SEQ ID NO: 284, SEQ ID NO: 286, SEQ ID NO: 288, SEQ ID NO: 290, SEQ ID NO: 292, SEQ ID NO: 294, SEQ ID NO: 296, SEQ ID NO: 298, SEQ ID NO: 300, SEQ ID NO: 302, SEQ ID NO: 304, SEQ ID NO: 306, SEQ ID NO: 308, SEQ ID NO: 310, SEQ ID NO: 312, SEQ ID NO: 314, SEQ ID NO: 316, SEQ ID NO: 318, SEQ ID NO: 320, SEQ ID NO: 322, SEQ ID NO: 324, SEQ ID NO: 326, SEQ ID NO: 328, SEQ ID NO: 330, SEQ ID NO: 332, SEQ ID NO: 334, SEQ ID NO: 336, SEQ ID NO: 338, SEQ ID NO: 340, SEQ ID NO: 342, SEQ ID NO: 344, SEQ ID NO: 346, SEQ ID NO: 348, SEQ ID NO: 350, SEQ ID NO: 352, SEQ ID NO: 354, SEQ ID NO: 356, SEQ ID NO: 358, SEQ ID NO: 360, SEQ ID NO: 362, SEQ ID NO: 364, SEQ ID NO: 366, SEQ ID NO: 368, SEQ ID NO: 370, SEQ ID NO: 372, SEQ ID NO: 374, SEQ ID NO: 376, SEQ ID NO: 378, SEQ ID NO: 380, SEQ ID NO: 382, SEQ ID NO: 384, SEQ ID NO: 386, SEQ ID NO: 388, SEQ ID NO: 390, SEQ ID NO: 392, SEQ ID NO: 394, SEQ ID NO: 396, SEQ ID NO: 398, SEQ ID NO: 400, SEQ ID NO: 402, SEQ ID NO: 404, SEQ ID NO: 406, SEQ ID NO: 408, SEQ ID NO: 410, SEQ ID NO: 412, SEQ ID NO: 414, SEQ ID NO: 416, SEQ ID NO: 418, SEQ ID NO: 420, SEQ ID NO: 422, SEQ ID NO: 424, SEQ ID NO: 426, SEQ ID NO: 428, SEQ ID NO: 430, SEQ ID NO: 432, SEQ ID NO: 434 or SEQ ID NO: 440, or a portion thereof and encodes a protein having aforementioned activity, e.g. conferring a methionine increase upon the reduction of deletion of its activity, and optionally, the biological activity of the protein of the invention.

[0277] Moreover, the nucleic acid molecule of the invention can comprise only a portion of the coding region of one of the sequences in SEQ ID NO: 1, SEQ ID NO: 3, SEQ ID NO: 5, SEQ ID NO: 7, SEQ ID NO: 9, SEQ ID NO: 11, SEQ ID NO: 13, SEQ ID NO: 15, SEQ ID NO: 19, SEQ ID NO: 21, SEQ ID NO: 23, SEQ ID NO: 25, SEQ ID NO: 27, SEQ ID NO: 29, SEQ ID NO: 31; SEQ ID NO: 64, SEQ ID NO: 66, SEQ ID NO: 68, SEQ ID NO: 70, SEQ ID NO: 72, SEQ ID NO: 74, SEQ ID NO: 76, SEQ ID NO: 78, SEQ ID NO: 80, SEQ ID NO: 82, SEQ ID NO: 84, SEQ ID NO: 86, SEQ ID NO: 88, SEQ ID NO: 90, SEQ ID NO: 92, SEQ ID NO: 94, SEQ ID NO: 96, SEQ ID NO: 98, SEQ ID NO: 100, SEQ ID NO: 102, SEQ ID NO: 104, SEQ ID NO: 106, SEQ ID NO: 108, SEQ ID NO: 110, SEQ ID NO: 112, SEQ ID NO: 114, SEQ ID NO: 116, SEQ ID NO: 118, SEQ ID NO: 120, SEQ ID NO: 122, SEQ ID NO: 124, SEQ ID NO: 126, SEQ ID NO: 128, SEQ ID NO: 130, SEQ ID NO: 132, SEQ ID NO: 134, SEQ ID NO: 136, SEQ ID NO: 138, SEQ ID NO: 140, SEQ ID NO: , SEQ ID NO: 142, SEQ ID NO: 151, SEQ ID NO: 153, SEQ ID NO: 155, SEQ ID NO: 157, SEQ ID NO: 159, SEQ ID NO: 161, SEQ ID NO: 163, SEQ ID NO: 165, SEQ ID NO: 167, SEQ ID NO: 169, SEQ ID NO: 171, SEQ ID NO: 173, SEQ ID NO: 175, SEQ ID NO: 177, SEQ ID NO: 179, SEQ ID NO: 181, SEQ ID NO: 183, SEQ ID NO: 185, SEQ ID NO: 187, SEQ ID NO: 189, SEQ ID NO: 191, SEQ ID NO: 193, SEQ ID NO: 195, SEQ ID NO: 197, SEQ ID NO: 199, SEQ ID NO: 201, SEQ ID NO: 203, SEQ ID NO: 205, SEQ ID NO: 207, SEQ ID NO: 209, SEQ ID NO: 211, SEQ ID NO: 213, SEQ ID NO: 215, SEQ ID NO: 217, SEQ ID NO: 219, SEQ ID NO: 228, SEQ ID NO: 230, SEQ ID NO: 232, SEQ ID NO: 234, SEQ ID NO: 236, SEQ ID NO: 238, SEQ ID NO: 240, SEQ ID NO: 242, SEQ ID NO: 249, SEQ ID NO: 251, SEQ ID NO: 253, SEQ ID NO: 255, SEQ ID NO: 257, SEQ ID NO: 259, SEQ ID NO: 261, SEQ ID NO: 263, SEQ ID NO: 265, SEQ ID NO: 267, SEQ ID NO: 269, SEQ ID NO: 271, SEQ ID NO: 282, SEQ ID NO: 284, SEQ ID NO: 286, SEQ ID NO: 288, SEQ ID NO: 290, SEQ ID NO: 292, SEQ ID NO: 294, SEQ ID NO: 296, SEQ ID NO: 298, SEQ ID NO: 300, SEQ ID NO: 302, SEQ ID NO: 304, SEQ ID NO: 306, SEQ ID NO: 308, SEQ ID NO: 310, SEQ ID NO: 312, SEQ ID NO: 314, SEQ ID NO: 316, SEQ ID NO: 318, SEQ ID NO: 320, SEQ ID NO: 322, SEQ ID NO: 324, SEQ ID NO: 326, SEQ ID NO: 328, SEQ ID NO: 330, SEQ ID NO: 332, SEQ ID NO: 334, SEQ ID NO: 336, SEQ ID NO: 338, SEQ ID NO: 340, SEQ ID NO: 342, SEQ ID NO: 344, SEQ ID NO: 346, SEQ ID NO: 348, SEQ ID NO: 350, SEQ ID NO: 352, SEQ ID NO: 354, SEQ ID NO: 356, SEQ ID NO: 358, SEQ ID NO: 360, SEQ ID NO: 362, SEQ ID NO: 364, SEQ ID NO: 366, SEQ ID NO: 368, SEQ ID NO: 370, SEQ ID NO: 372, SEQ ID NO: 374, SEQ ID NO: 376, SEQ ID NO: 378, SEQ ID NO: 380, SEQ ID NO: 382, SEQ ID NO: 384, SEQ ID NO: 386, SEQ ID NO: 388, SEQ ID NO: 390, SEQ ID NO: 392, SEQ ID NO: 394, SEQ ID NO: 396, SEQ ID NO: 398, SEQ ID NO: 400, SEQ ID NO: 402, SEQ ID NO: 404, SEQ ID NO: 406, SEQ ID NO: 408, SEQ ID NO: 410, SEQ ID NO: 412, SEQ ID NO: 414, SEQ ID NO: 416, SEQ ID NO: 418, SEQ ID NO: 420, SEQ ID NO: 422, SEQ ID NO: 424, SEQ ID NO: 426, SEQ ID NO: 428, SEQ ID NO: 430, SEQ ID NO: 432, SEQ ID NO: 434 or SEQ ID NO: 440, for example a fragment which can be used as a probe or primer or a fragment encoding a biologically active portion of the nucleic acid molecule or polypeptide of the present invention or a fragment encoding a non active part of the nucleic acid molecule or the polypeptide of the invention, i.e. having abovementioned activity, e.g. conferring an increase of the fine chemical if its expression or activity is decreased. The nucleotide sequences determined from the cloning of the present protein according to the invention encoding gene allows for the generation of probes and primers designed for use in identifying and/or cloning its homologues in other cell types and organisms. The probe/primer typically comprises substantially purified oligonucleotide. The oligonucleotide typically comprises a region of nucleotide sequence that hybridizes under stringent conditions to at least about 12, preferably about 20 or 25, more preferably about 40, 50 or 75 consecutive nucleotides of a sense strand of one of the sequences set forth, e.g., in SEQ ID NO: 1, SEQ ID NO: 3, SEQ ID NO: 5, SEQ ID NO: 7, SEQ ID NO: 9, SEQ ID NO: 11, SEQ ID NO: 13, SEQ ID NO: 15, SEQ ID NO: 19, SEQ ID NO: 21, SEQ ID NO: 23, SEQ ID NO: 25, SEQ ID NO: 27, SEQ ID NO: 29, SEQ ID NO: 31; SEQ ID NO: 64, SEQ ID NO: 66, SEQ ID NO: 68, SEQ ID NO: 70, SEQ ID NO: 72, SEQ ID NO: 74, SEQ ID NO: 76, SEQ ID NO: 78, SEQ ID NO: 80, SEQ ID NO: 82, SEQ ID NO: 84, SEQ ID NO: 86, SEQ ID NO: 88, SEQ ID NO: 90, SEQ ID NO: 92, SEQ ID NO: 94, SEQ ID NO: 96, SEQ ID NO: 98, SEQ ID NO: 100, SEQ ID NO: 102, SEQ ID NO: 104, SEQ ID NO: 106, SEQ ID NO: 108, SEQ ID NO: 110, SEQ ID NO: 112, SEQ ID NO: 114, SEQ ID NO: 116, SEQ ID NO: 118, SEQ ID NO: 120, SEQ ID NO: 122, SEQ ID NO: 124, SEQ ID NO: 126, SEQ ID NO: 128, SEQ ID NO: 130, SEQ ID NO: 132, SEQ ID NO: 134, SEQ ID NO: 136, SEQ ID NO: 138, SEQ ID NO: 140, SEQ ID NO: , SEQ ID NO: 142, SEQ ID NO: 151, SEQ ID NO: 153, SEQ ID NO: 155, SEQ ID NO: 157, SEQ ID NO: 159, SEQ ID NO: 161, SEQ ID NO: 163, SEQ ID NO: 165, SEQ ID NO: 167, SEQ ID NO: 169, SEQ ID NO: 171, SEQ ID NO: 173, SEQ ID NO: 175, SEQ ID NO: 177, SEQ ID NO: 179, SEQ ID NO: 181, SEQ ID NO: 183, SEQ ID NO: 185, SEQ ID NO: 187, SEQ ID NO: 189, SEQ ID NO: 191, SEQ ID NO: 193, SEQ ID NO: 195, SEQ ID NO: 197, SEQ ID NO: 199, SEQ ID NO: 201, SEQ ID NO: 203, SEQ ID NO: 205, SEQ ID NO: 207, SEQ ID NO: 209, SEQ ID NO: 211, SEQ ID NO: 213, SEQ ID NO: 215, SEQ ID NO: 217, SEQ ID NO: 219, SEQ ID NO: 228, SEQ ID NO: 230, SEQ ID NO: 232, SEQ ID NO: 234, SEQ ID NO: 236, SEQ ID NO: 238, SEQ ID NO: 240, SEQ ID NO: 242, SEQ ID NO: 249, SEQ ID NO: 251, SEQ ID NO: 253, SEQ ID NO: 255, SEQ ID NO: 257, SEQ ID NO: 259, SEQ ID NO: 261, SEQ ID NO: 263, SEQ ID NO: 265, SEQ ID NO: 267, SEQ ID NO: 269, SEQ ID NO: 271, SEQ ID NO: 282, SEQ ID NO: 284, SEQ ID NO: 286, SEQ ID NO: 288, SEQ ID NO: 290, SEQ ID NO: 292, SEQ ID NO: 294, SEQ ID NO: 296, SEQ ID NO: 298, SEQ ID NO: 300, SEQ ID NO: 302, SEQ ID NO: 304, SEQ ID NO: 306, SEQ ID NO: 308, SEQ ID NO: 310, SEQ ID NO: 312, SEQ ID NO: 314, SEQ ID NO: 316, SEQ ID NO: 318, SEQ ID NO: 320, SEQ ID NO: 322, SEQ ID NO: 324, SEQ ID NO: 326, SEQ ID NO: 328, SEQ ID NO: 330, SEQ ID NO: 332, SEQ ID NO: 334, SEQ ID NO: 336, SEQ ID NO: 338, SEQ ID NO: 340, SEQ ID NO: 342, SEQ ID NO: 344, SEQ ID NO: 346, SEQ ID NO: 348, SEQ ID NO: 350, SEQ ID NO: 352, SEQ ID NO: 354, SEQ ID NO: 356, SEQ ID NO: 358, SEQ ID NO: 360, SEQ ID NO: 362, SEQ ID NO: 364, SEQ ID NO: 366, SEQ ID NO: 368, SEQ ID NO: 370, SEQ ID NO: 372, SEQ ID NO: 374, SEQ ID NO: 376, SEQ ID NO: 378, SEQ ID NO: 380, SEQ ID NO: 382, SEQ ID NO: 384, SEQ ID NO: 386, SEQ ID NO: 388, SEQ ID NO: 390, SEQ ID NO: 392, SEQ ID NO: 394, SEQ ID NO: 396, SEQ ID NO: 398, SEQ ID NO: 400, SEQ ID NO: 402, SEQ ID NO: 404, SEQ ID NO: 406, SEQ ID NO: 408, SEQ ID NO: 410, SEQ ID NO: 412, SEQ ID NO: 414, SEQ ID NO: 416, SEQ ID NO: 418, SEQ ID NO: 420, SEQ ID NO: 422, SEQ ID NO: 424, SEQ ID NO: 426, SEQ ID NO: 428, SEQ ID NO: 430, SEQ ID NO: 432, SEQ ID NO: 434 or SEQ ID NO: 440, an anti-sense sequence of one of the sequences, e.g., set forth in SEQ ID NO: 1, SEQ ID NO: 3, SEQ ID NO: 5, SEQ ID NO: 7, SEQ ID NO: 9, SEQ ID NO: 11, SEQ ID NO: 13, SEQ ID NO: 15, SEQ ID NO: 19, SEQ ID NO: 21, SEQ ID NO: 23, SEQ ID NO: 25, SEQ ID NO: 27, SEQ ID NO: 29, SEQ ID NO: 31; SEQ ID NO: 64, SEQ ID NO: 66, SEQ ID NO: 68, SEQ ID NO: 70, SEQ ID NO: 72, SEQ ID NO: 74, SEQ ID NO: 76, SEQ ID NO: 78, SEQ ID NO: 80, SEQ ID NO: 82, SEQ ID NO: 84, SEQ ID NO: 86, SEQ ID NO: 88, SEQ ID NO: 90, SEQ ID NO: 92, SEQ ID NO: 94, SEQ ID NO: 96, SEQ ID NO: 98, SEQ ID NO: 100, SEQ ID NO: 102, SEQ ID NO: 104, SEQ ID NO: 106, SEQ ID NO: 108, SEQ ID NO: 110, SEQ ID NO: 112, SEQ ID NO: 114, SEQ ID NO: 116, SEQ ID NO: 118, SEQ ID NO: 120, SEQ ID NO: 122, SEQ ID NO: 124, SEQ ID NO: 126, SEQ ID NO: 128, SEQ ID NO: 130, SEQ ID NO: 132, SEQ ID NO: 134, SEQ ID NO: 136, SEQ ID NO: 138, SEQ ID NO: 140, SEQ ID NO: , SEQ ID NO: 142, SEQ ID NO: 151, SEQ ID NO: 153, SEQ ID NO: 155, SEQ ID NO: 157, SEQ ID NO: 159, SEQ ID NO: 161, SEQ ID NO: 163, SEQ ID NO: 165, SEQ ID NO: 167, SEQ ID NO: 169, SEQ ID NO: 171, SEQ ID NO: 173, SEQ ID NO: 175, SEQ ID NO: 177, SEQ ID NO: 179, SEQ ID NO: 181, SEQ ID NO: 183, SEQ ID NO: 185, SEQ ID NO: 187, SEQ ID NO: 189, SEQ ID NO: 191, SEQ ID NO: 193, SEQ ID NO: 195, SEQ ID NO: 197, SEQ ID NO: 199, SEQ ID NO: 201, SEQ ID NO: 203, SEQ ID NO: 205, SEQ ID NO: 207, SEQ ID NO: 209, SEQ ID NO: 211, SEQ ID NO: 213, SEQ ID NO: 215, SEQ ID NO: 217, SEQ ID NO: 219, SEQ ID NO: 228, SEQ ID NO: 230, SEQ ID NO: 232, SEQ ID NO: 234, SEQ ID NO: 236, SEQ ID NO: 238, SEQ ID NO: 240, SEQ ID NO: 242, SEQ ID NO: 249, SEQ ID NO: 251, SEQ ID NO: 253, SEQ ID NO: 255, SEQ ID NO: 257, SEQ ID NO: 259, SEQ ID NO: 261, SEQ ID NO: 263, SEQ ID NO: 265, SEQ ID NO: 267, SEQ ID NO: 269, SEQ ID NO: 271, SEQ ID NO: 282, SEQ ID NO: 284, SEQ ID NO: 286, SEQ ID NO: 288, SEQ ID NO: 290, SEQ ID NO: 292, SEQ ID NO: 294, SEQ ID NO: 296, SEQ ID NO: 298, SEQ ID NO: 300, SEQ ID NO: 302, SEQ ID NO: 304, SEQ ID NO: 306, SEQ ID NO: 308, SEQ ID NO: 310, SEQ ID NO: 312, SEQ ID NO: 314, SEQ ID NO: 316, SEQ ID NO: 318, SEQ ID NO: 320, SEQ ID NO: 322, SEQ ID NO: 324, SEQ ID NO: 326, SEQ ID NO: 328, SEQ ID NO: 330, SEQ ID NO: 332, SEQ ID NO: 334, SEQ ID NO: 336, SEQ ID NO: 338, SEQ ID NO: 340, SEQ ID NO: 342, SEQ ID NO: 344, SEQ ID NO: 346, SEQ ID NO: 348, SEQ ID NO: 350, SEQ ID NO: 352, SEQ ID NO: 354, SEQ ID NO: 356, SEQ ID NO: 358, SEQ ID NO: 360, SEQ ID NO: 362, SEQ ID NO: 364, SEQ ID NO: 366, SEQ ID NO: 368, SEQ ID NO: 370, SEQ ID NO: 372, SEQ ID NO: 374, SEQ ID NO: 376, SEQ ID NO: 378, SEQ ID NO: 380, SEQ ID NO: 382, SEQ ID NO: 384, SEQ ID NO: 386, SEQ ID NO: 388, SEQ ID NO: 390, SEQ ID NO: 392, SEQ ID NO: 394, SEQ ID NO: 396, SEQ ID NO: 398, SEQ ID NO: 400, SEQ ID NO: 402, SEQ ID NO: 404, SEQ ID NO: 406, SEQ ID NO: 408, SEQ ID NO: 410, SEQ ID NO: 412, SEQ ID NO: 414, SEQ ID NO: 416, SEQ ID NO: 418, SEQ ID NO: 420, SEQ ID NO: 422, SEQ ID NO: 424, SEQ ID NO: 426, SEQ ID NO: 428, SEQ ID NO: 430, SEQ ID NO: 432, SEQ ID NO: 434 or SEQ ID NO: 440, or naturally occurring mutants thereof. Primers based on a nucleotide of invention can be used in PCR reactions to clone homologues of the polypeptide of the invention, e.g. as the primers described in the examples of the present invention, e.g. as shown in the examples. Said nucleic acid molecules, which are homologues of the sequence of the invention or the nucleic acid molecules of the invention themselves can be used to reduce, decrease or delete the biological activity of the nucleic acid molecules and/or proteins of the invention.

[0278] Primer sets are interchangeable. The person skilled in the art knows to combine said primers to result in the desired product, e.g. in a full-length clone or a partial sequence. Probes based on the sequences of the nucleic acid molecule of the invention can be used to detect transcripts or genomic sequences encoding the same or homologous proteins. The probe can further comprise a label group attached thereto, e.g. the label group can be a radioisotope, a fluorescent compound, an enzyme, or an enzyme co-factor. Such probes can be used as a part of a genomic marker test kit for identifying cells which express or does not express a polypeptide of the invention, such as by measuring a level of an encoding nucleic acid molecule in a sample of cells, e.g., detecting mRNA levels or determining, whether a genomic gene comprising the sequence of the polynucleotide of the invention has been mutated or deleted.

[0279] The nucleic acid molecule of the invention encodes a polypeptide or portion thereof which includes an amino acid sequence which is sufficiently homologous to the amino acid sequence of SEQ ID NO: 2, SEQ ID NO: 4, SEQ ID NO: 6, SEQ ID NO: 8, SEQ ID NO: 10, SEQ ID NO: 12, SEQ ID NO: 14, SEQ ID NO: 16, SEQ ID NO: 20, SEQ ID NO: 22, SEQ ID NO: 24, SEQ ID NO: 26, SEQ ID NO: 28, SEQ ID NO. 30, SEQ ID NO: 32; SEQ ID NO: 65, SEQ ID NO: 67, SEQ ID NO: 69, SEQ ID NO: 71, SEQ ID NO: 73, SEQ ID NO: 75, SEQ ID NO: 77, SEQ ID NO: 79, SEQ ID NO: 81, SEQ ID NO: 83, SEQ ID NO: 85, SEQ ID NO: 87, SEQ ID NO: 89, SEQ ID NO: 91, SEQ ID NO: 93, SEQ ID NO: 95, SEQ ID NO: 97, SEQ ID NO: 99, SEQ ID NO: 101, SEQ ID NO: 103, SEQ ID NO: 105, SEQ ID NO: 107, SEQ ID NO: 109, SEQ ID NO: 111, SEQ ID NO: 113, SEQ ID NO: 115, SEQ ID NO: 117, SEQ ID NO: 119, SEQ ID NO: 121, SEQ ID NO: 123, SEQ ID NO: 125, SEQ ID NO: 127, SEQ ID NO: 129, SEQ ID NO: 131, SEQ ID NO: 133, SEQ ID NO: 135, SEQ ID NO: 137, SEQ ID NO: 139, SEQ ID NO: 141, SEQ ID NO: 143, SEQ ID NO: 152, SEQ ID NO: 154, SEQ ID NO: 156, SEQ ID NO: 158, SEQ ID NO: 160, SEQ ID NO: 162, SEQ ID NO: 164, SEQ ID NO: 166, SEQ ID NO: 168, SEQ ID NO: 170, SEQ ID NO: 172, SEQ ID NO: 174, SEQ ID NO: 176, SEQ ID NO: 178, SEQ ID NO: 180, SEQ ID NO: 182, SEQ ID NO: 184, SEQ ID NO: 186, SEQ ID NO: 188, SEQ ID NO: 190, SEQ ID NO: 192, SEQ ID NO: 194, SEQ ID NO: 196, SEQ ID NO: 198, SEQ ID NO: 200, SEQ ID NO: 202, SEQ ID NO: 204, SEQ ID NO: 206, SEQ ID NO: 208, SEQ ID NO: 210, SEQ ID NO: 212, SEQ ID NO: 214, SEQ ID NO: 216, SEQ ID NO: 218, SEQ ID NO: 220, SEQ ID NO: 229, SEQ ID NO:231, SEQ ID NO:233, SEQ ID NO: 235, SEQ ID NO: 237, SEQ ID NO: 239, SEQ ID NO: 241, SEQ ID NO: 243, SEQ ID NO: 250, SEQ ID NO: 252, SEQ ID NO: 254, SEQ ID NO: 256, SEQ ID NO: 258, SEQ ID NO: 260, SEQ ID NO: 262, SEQ ID NO: 264, SEQ ID NO: 266, SEQ ID NO: 268, SEQ ID NO: 270, SEQ ID NO: 272, SEQ ID NO: 283, SEQ ID NO: 285, SEQ ID NO: 287, SEQ ID NO: 289, SEQ ID NO: 291, SEQ ID NO: 293, SEQ ID NO: 295, SEQ ID NO: 297, SEQ ID NO: 299, SEQ ID NO: 301, SEQ ID NO: 303, SEQ ID NO: 305, SEQ ID NO: 307, SEQ ID NO: 309, SEQ ID NO: 311, SEQ ID NO: 313, SEQ ID NO: 315, SEQ ID NO: 317, SEQ ID NO: 319, SEQ ID NO: 321, SEQ ID NO: 323, SEQ ID NO: 325, SEQ ID NO: 327, SEQ ID NO: 329, SEQ ID NO: 331, SEQ ID NO: 333, SEQ ID NO: 335, SEQ ID NO: 337, SEQ ID NO: 339, SEQ ID NO: 341, SEQ ID NO: 343, SEQ ID NO: 345, SEQ ID NO: 347, SEQ ID NO: 349, SEQ ID NO: 351, SEQ ID NO: 353, SEQ ID NO: 355, SEQ ID NO: 357, SEQ ID NO: 359, SEQ ID NO: 361, SEQ ID NO: 363, SEQ ID NO: 365, SEQ ID NO: 367, SEQ ID NO: 369, SEQ ID NO: 371, SEQ ID NO: 373, SEQ ID NO: 375, SEQ ID NO: 377, SEQ ID NO: 379, SEQ ID NO: 381, SEQ ID NO: 383, SEQ ID NO: 385, SEQ ID NO: 387, SEQ ID NO: 389, SEQ ID NO: 391, SEQ ID NO: 393, SEQ ID NO: 395, SEQ ID NO: 397, SEQ ID NO: 399, SEQ ID NO: 401, SEQ ID NO: 403, SEQ ID NO: 405, SEQ ID NO: 407, SEQ ID NO: 409, SEQ ID NO: 411, SEQ ID NO: 413, SEQ ID NO: 415, SEQ ID NO: 417, SEQ ID NO: 419, SEQ ID NO: 421, SEQ ID NO: 423, SEQ ID NO: 425, SEQ ID NO: 427, SEQ ID NO: 429, SEQ ID NO: 431, SEQ ID NO: 433, SEQ ID NO: 435 or SEQ ID NO: 441 such that the protein or portion thereof maintains the ability to participate in the fine chemical production, in particular a compound such as the protein of the invention which is involved in the reduction, decrease and/or deletion of the fine chemical by for example metabolization, degradation or export of undisered chemical compounds and thereby increasing the production of the fine chemical upon the reduction or deletion of its activity as mentioned above or as described in the examples in plants or microorganisms is comprised.

[0280] As used herein, the language “sufficiently homologous” refers to proteins or portions thereof which have amino acid sequences which include a minimum number of identical or equivalent amino acid residues (e.g., an amino acid residue which has a similar side chain as an amino acid residue in one of the sequences of the polypeptide of the present invention) to an amino acid sequence shown in SEQ ID NO: 2, SEQ ID NO: 4, SEQ ID NO: 6, SEQ ID NO: 8, SEQ ID NO: 10, SEQ ID NO: 12, SEQ ID NO: 14, SEQ ID NO: 16, SEQ ID NO: 20, SEQ ID NO: 22, SEQ ID NO: 24, SEQ ID NO: 26, SEQ ID NO: 28, SEQ ID NO. 30, SEQ ID NO: 32; SEQ ID NO: 65, SEQ ID NO: 67, SEQ ID NO: 69, SEQ ID NO: 71, SEQ ID NO: 73, SEQ ID NO: 75, SEQ ID NO: 77, SEQ ID NO: 79, SEQ ID NO: 81, SEQ ID NO: 83, SEQ ID NO: 85, SEQ ID NO: 87, SEQ ID NO: 89, SEQ ID NO: 91, SEQ ID NO: 93, SEQ ID NO: 95, SEQ ID NO: 97, SEQ ID NO: 99, SEQ ID NO: 101, SEQ ID NO: 103, SEQ ID NO: 105, SEQ ID NO: 107, SEQ ID NO: 109, SEQ ID NO: 111, SEQ ID NO: 113, SEQ ID NO: 115, SEQ ID NO: 117, SEQ ID NO: 119, SEQ ID NO: 121, SEQ ID NO: 123, SEQ ID NO: 125, SEQ ID NO: 127, SEQ ID NO: 129, SEQ ID NO: 131, SEQ ID NO: 133, SEQ ID NO: 135, SEQ ID NO: 137, SEQ ID NO: 139, SEQ ID NO: 141, SEQ ID NO: 143, SEQ ID NO: 152, SEQ ID NO: 154, SEQ ID NO: 156, SEQ ID NO: 158, SEQ ID NO: 160, SEQ ID NO: 162, SEQ ID NO: 164, SEQ ID NO: 166, SEQ ID NO: 168, SEQ ID NO: 170, SEQ ID NO: 172, SEQ ID NO: 174, SEQ ID NO: 176, SEQ ID NO: 178, SEQ ID NO: 180, SEQ ID NO: 182, SEQ ID NO: 184, SEQ ID NO: 186, SEQ ID NO: 188, SEQ ID NO: 190, SEQ ID NO: 192, SEQ ID NO: 194, SEQ ID NO: 196, SEQ ID NO: 198, SEQ ID NO: 200, SEQ ID NO: 202, SEQ ID NO: 204, SEQ ID NO: 206, SEQ ID NO: 208, SEQ ID NO: 210, SEQ ID NO: 212, SEQ ID NO: 214, SEQ ID NO: 216, SEQ ID NO: 218, SEQ ID NO: 220, SEQ ID NO: 229, SEQ ID NO:231, SEQ ID NO:233, SEQ ID NO: 235, SEQ ID NO: 237, SEQ ID NO: 239, SEQ ID NO: 241, SEQ ID NO: 243, SEQ ID NO: 250, SEQ ID NO: 252, SEQ ID NO: 254, SEQ ID NO: 256, SEQ ID NO: 258, SEQ ID NO: 260, SEQ ID NO: 262, SEQ ID NO: 264, SEQ ID NO: 266, SEQ ID NO: 268, SEQ ID NO: 270, SEQ ID NO: 272, SEQ ID NO: 283, SEQ ID NO: 285, SEQ ID NO: 287, SEQ ID NO: 289, SEQ ID NO: 291, SEQ ID NO: 293, SEQ ID NO: 295, SEQ ID NO: 297, SEQ ID NO: 299, SEQ ID NO: 301, SEQ ID NO: 303, SEQ ID NO: 305, SEQ ID NO: 307, SEQ ID NO: 309, SEQ ID NO: 311, SEQ ID NO: 313, SEQ ID NO: 315, SEQ ID NO: 317, SEQ ID NO: 319, SEQ ID NO: 321, SEQ ID NO: 323, SEQ ID NO: 325, SEQ ID NO: 327, SEQ ID NO: 329, SEQ ID NO: 331, SEQ ID NO: 333, SEQ ID NO: 335, SEQ ID NO: 337, SEQ ID NO: 339, SEQ ID NO: 341, SEQ ID NO: 343, SEQ ID NO: 345, SEQ ID NO: 347, SEQ ID NO: 349, SEQ ID NO: 351, SEQ ID NO: 353, SEQ ID NO: 355, SEQ ID NO: 357, SEQ ID NO: 359, SEQ ID NO: 361, SEQ ID NO: 363, SEQ ID NO: 365, SEQ ID NO: 367, SEQ ID NO: 369, SEQ ID NO: 371, SEQ ID NO: 373, SEQ ID NO: 375, SEQ ID NO: 377, SEQ ID NO: 379, SEQ ID NO: 381, SEQ ID NO: 383, SEQ ID NO: 385, SEQ ID NO: 387, SEQ ID NO: 389, SEQ ID NO: 391, SEQ ID NO: 393, SEQ ID NO: 395, SEQ ID NO: 397, SEQ ID NO: 399, SEQ ID NO: 401, SEQ ID NO: 403, SEQ ID NO: 405, SEQ ID NO: 407, SEQ ID NO: 409, SEQ ID NO: 411, SEQ ID NO: 413, SEQ ID NO: 415, SEQ ID NO: 417, SEQ ID NO: 419, SEQ ID NO: 421, SEQ ID NO: 423, SEQ ID NO: 425, SEQ ID NO: 427, SEQ ID NO: 429, SEQ ID NO: 431, SEQ ID NO: 433, SEQ ID NO: 435 or SEQ ID NO: 441. Portions of the aforementioned amino acid sequence are at least 3, 5, 10, 20, 30, 40, 50 or more amino acids in length. Nucleic acid sequences, which as a result of the degeneracy of the genetic code, can be derived from said polypeptide sequences can be used for the repression, decrease or deletion of the biological activity of the polypeptide or the nucleic acid molecule of the invention according to the disclosure herein.

[0281] In one embodiment, the nucleic acid molecule of the present invention comprises a nucleic acid that encodes a portion of the protein of the present invention. The protein is at least about 30%, 35%, 40%, 45% or 50%, preferably at least about 55%, 60%, 65% or 70% and more preferably at least about 75%, 80%, 85%, 90%, 91%, 92%, 93% or 94% and most preferably at least about 95%, 97%, 98%, 99% or more homologous to an entire amino acid sequence of SEQ ID NO: 2, SEQ ID NO: 4, SEQ ID NO: 6, SEQ ID NO: 8, SEQ ID NO: 10, SEQ ID NO: 12, SEQ ID NO: 14, SEQ ID NO: 16, SEQ ID NO: 20, SEQ ID NO: 22, SEQ ID NO: 24, SEQ ID NO: 26, SEQ ID NO: 28, SEQ ID NO. 30, SEQ ID NO: 32; SEQ ID NO: 65, SEQ ID NO: 67, SEQ ID NO: 69, SEQ ID NO: 71, SEQ ID NO: 73, SEQ ID NO: 75, SEQ ID NO: 77, SEQ ID NO: 79, SEQ ID NO: 81, SEQ ID NO: 83, SEQ ID NO: 85, SEQ ID NO: 87, SEQ ID NO: 89, SEQ ID NO: 91, SEQ ID NO: 93, SEQ ID NO: 95, SEQ ID NO: 97, SEQ ID NO: 99, SEQ ID NO: 101, SEQ ID NO: 103, SEQ ID NO: 105, SEQ ID NO: 107, SEQ ID NO: 109, SEQ ID NO: 111, SEQ ID NO: 113, SEQ ID NO: 115, SEQ ID NO: 117, SEQ ID NO: 119, SEQ ID NO: 121, SEQ ID NO: 123, SEQ ID NO: 125, SEQ ID NO: 127, SEQ ID NO: 129, SEQ ID NO: 131, SEQ ID NO: 133, SEQ ID NO: 135, SEQ ID NO: 137, SEQ ID NO: 139, SEQ ID NO: 141, SEQ ID NO: 143, SEQ ID NO: 152, SEQ ID NO: 154, SEQ ID NO: 156, SEQ ID NO: 158, SEQ ID NO: 160, SEQ ID NO: 162, SEQ ID NO: 164, SEQ ID NO: 166, SEQ ID NO: 168, SEQ ID NO: 170, SEQ ID NO: 172, SEQ ID NO: 174, SEQ ID NO: 176, SEQ ID NO: 178, SEQ ID NO: 180, SEQ ID NO: 182, SEQ ID NO: 184, SEQ ID NO: 186, SEQ ID NO: 188, SEQ ID NO: 190, SEQ ID NO: 192, SEQ ID NO: 194, SEQ ID NO: 196, SEQ ID NO: 198, SEQ ID NO: 200, SEQ ID NO: 202, SEQ ID NO: 204, SEQ ID NO: 206, SEQ ID NO: 208, SEQ ID NO: 210, SEQ ID NO: 212, SEQ ID NO: 214, SEQ ID NO: 216, SEQ ID NO: 218, SEQ ID NO: 220, SEQ ID NO: 229, SEQ ID NO:231, SEQ ID NO:233, SEQ ID NO: 235, SEQ ID NO: 237, SEQ ID NO: 239, SEQ ID NO: 241, SEQ ID NO: 243, SEQ ID NO: 250, SEQ ID NO: 252, SEQ ID NO: 254, SEQ ID NO: 256, SEQ ID NO: 258, SEQ ID NO: 260, SEQ ID NO: 262, SEQ ID NO: 264, SEQ ID NO: 266, SEQ ID NO: 268, SEQ ID NO: 270, SEQ ID NO: 272, SEQ ID NO: 283, SEQ ID NO: 285, SEQ ID NO: 287, SEQ ID NO: 289, SEQ ID NO: 291, SEQ ID NO: 293, SEQ ID NO: 295, SEQ ID NO: 297, SEQ ID NO: 299, SEQ ID NO: 301, SEQ ID NO: 303, SEQ ID NO: 305, SEQ ID NO: 307, SEQ ID NO: 309, SEQ ID NO: 311, SEQ ID NO: 313, SEQ ID NO: 315, SEQ ID NO: 317, SEQ ID NO: 319, SEQ ID NO: 321, SEQ ID NO: 323, SEQ ID NO: 325, SEQ ID NO: 327, SEQ ID NO: 329, SEQ ID NO: 331, SEQ ID NO: 333, SEQ ID NO: 335, SEQ ID NO: 337, SEQ ID NO: 339, SEQ ID NO: 341, SEQ ID NO: 343, SEQ ID NO: 345, SEQ ID NO: 347, SEQ ID NO: 349, SEQ ID NO: 351, SEQ ID NO: 353, SEQ ID NO: 355, SEQ ID NO: 357, SEQ ID NO: 359, SEQ ID NO: 361, SEQ ID NO: 363, SEQ ID NO: 365, SEQ ID NO: 367, SEQ ID NO: 369, SEQ ID NO: 371, SEQ ID NO: 373, SEQ ID NO: 375, SEQ ID NO: 377, SEQ ID NO: 379, SEQ ID NO: 381, SEQ ID NO: 383, SEQ ID NO: 385, SEQ ID NO: 387, SEQ ID NO: 389, SEQ ID NO: 391, SEQ ID NO: 393, SEQ ID NO: 395, SEQ ID NO: 397, SEQ ID NO: 399, SEQ ID NO: 401, SEQ ID NO: 403, SEQ ID NO: 405, SEQ ID NO: 407, SEQ ID NO: 409, SEQ ID NO: 411, SEQ ID NO: 413, SEQ ID NO: 415, SEQ ID NO: 417, SEQ ID NO: 419, SEQ ID NO: 421, SEQ ID NO: 423, SEQ ID NO: 425, SEQ ID NO: 427, SEQ ID NO: 429, SEQ ID NO: 431, SEQ ID NO: 433, SEQ ID NO: 435 or SEQ ID NO: 441 and having above-mentioned activity, e.g. conferring preferably the increase of the fine chemical.

[0282] Portions of proteins encoded by the nucleic acid molecule of the invention are preferably in such a manner biologically active, that they are increasing the productivity to produce the fine chemical by being in its biological activity reduced, decreased or deleted.

[0283] As mentioned herein, the term “biologically active portion” is intended to include a portion, e.g., a domain/motif, that confers by introducing said nucleic acid sequence or part thereof an increase of the production of the fine chemical.

[0284] The invention further relates to nucleic acid molecules which are used in the inventive process and which as a result of degeneracy of the genetic code can be derived from a polypeptide sequence as depicted in SEQ ID NO: 2, SEQ ID NO: 4, SEQ ID NO: 6, SEQ ID NO: 8, SEQ ID NO: 10, SEQ ID NO: 12, SEQ ID NO: 14, SEQ ID NO: 16, SEQ ID NO: 20, SEQ ID NO: 22, SEQ ID NO: 24, SEQ ID NO: 26, SEQ ID NO: 28, SEQ ID NO. 30, SEQ ID NO: 32; SEQ ID NO: 65, SEQ ID NO: 67, SEQ ID NO: 69, SEQ ID NO: 71, SEQ ID NO: 73, SEQ ID NO: 75, SEQ ID NO: 77, SEQ ID NO: 79, SEQ ID NO: 81, SEQ ID NO: 83, SEQ ID NO: 85, SEQ ID NO: 87, SEQ ID NO: 89, SEQ ID NO: 91, SEQ ID NO: 93, SEQ ID NO: 95, SEQ ID NO: 97, SEQ ID NO: 99, SEQ ID NO: 101, SEQ ID NO: 103, SEQ ID NO: 105, SEQ ID NO: 107, SEQ ID NO: 109, SEQ ID NO: 111, SEQ ID NO: 113, SEQ ID NO: 115, SEQ ID NO: 117, SEQ ID NO: 119, SEQ ID NO: 121, SEQ ID NO: 123, SEQ ID NO: 125, SEQ ID NO: 127, SEQ ID NO: 129, SEQ ID NO: 131, SEQ ID NO: 133, SEQ ID NO: 135, SEQ ID NO: 137, SEQ ID NO: 139, SEQ ID NO: 141, SEQ ID NO: 143, SEQ ID NO: 152, SEQ ID NO: 154, SEQ ID NO: 156, SEQ ID NO: 158, SEQ ID NO: 160, SEQ ID NO: 162, SEQ ID NO: 164, SEQ ID NO: 166, SEQ ID NO: 168, SEQ ID NO: 170, SEQ ID NO: 172, SEQ ID NO: 174, SEQ ID NO: 176, SEQ ID NO: 178, SEQ ID NO: 180, SEQ ID NO: 182, SEQ ID NO: 184, SEQ ID NO: 186, SEQ ID NO: 188, SEQ ID NO: 190, SEQ ID NO: 192, SEQ ID NO: 194, SEQ ID NO: 196, SEQ ID NO: 198, SEQ ID NO: 200, SEQ ID NO: 202, SEQ ID NO: 204, SEQ ID NO: 206, SEQ ID NO: 208, SEQ ID NO: 210, SEQ ID NO: 212, SEQ ID NO: 214, SEQ ID NO: 216, SEQ ID NO: 218, SEQ ID NO: 220, SEQ ID NO: 229, SEQ ID NO:231, SEQ ID NO:233, SEQ ID NO: 235, SEQ ID NO: 237, SEQ ID NO: 239, SEQ ID NO: 241, SEQ ID NO: 243, SEQ ID NO: 250, SEQ ID NO: 252, SEQ ID NO: 254, SEQ ID NO: 256, SEQ ID NO: 258, SEQ ID NO: 260, SEQ ID NO: 262, SEQ ID NO: 264, SEQ ID NO: 266, SEQ ID NO: 268, SEQ ID NO: 270, SEQ ID NO: 272, SEQ ID NO: 283, SEQ ID NO: 285, SEQ ID NO: 287, SEQ ID NO: 289, SEQ ID NO: 291, SEQ ID NO: 293, SEQ ID NO: 295, SEQ ID NO: 297, SEQ ID NO: 299, SEQ ID NO: 301, SEQ ID NO: 303, SEQ ID NO: 305, SEQ ID NO: 307, SEQ ID NO: 309, SEQ ID NO: 311, SEQ ID NO: 313, SEQ ID NO: 315, SEQ ID NO: 317, SEQ ID NO: 319, SEQ ID NO: 321, SEQ ID NO: 323, SEQ ID NO: 325, SEQ ID NO: 327, SEQ ID NO: 329, SEQ ID NO: 331, SEQ ID NO: 333, SEQ ID NO: 335, SEQ ID NO: 337, SEQ ID NO: 339, SEQ ID NO: 341, SEQ ID NO: 343, SEQ ID NO: 345, SEQ ID NO: 347, SEQ ID NO: 349, SEQ ID NO: 351, SEQ ID NO: 353, SEQ ID NO: 355, SEQ ID NO: 357, SEQ ID NO: 359, SEQ ID NO: 361, SEQ ID NO: 363, SEQ ID NO: 365, SEQ ID NO: 367, SEQ ID NO: 369, SEQ ID NO: 371, SEQ ID NO: 373, SEQ ID NO: 375, SEQ ID NO: 377, SEQ ID NO: 379, SEQ ID NO: 381, SEQ ID NO: 383, SEQ ID NO: 385, SEQ ID NO: 387, SEQ ID NO: 389, SEQ ID NO: 391, SEQ ID NO: 393, SEQ ID NO: 395, SEQ ID NO: 397, SEQ ID NO: 399, SEQ ID NO: 401, SEQ ID NO: 403, SEQ ID NO: 405, SEQ ID NO: 407, SEQ ID NO: 409, SEQ ID NO: 411, SEQ ID NO: 413, SEQ ID NO: 415, SEQ ID NO: 417, SEQ ID NO: 419, SEQ ID NO: 421, SEQ ID NO: 423, SEQ ID NO: 425, SEQ ID NO: 427, SEQ ID NO: 429, SEQ ID NO: 431, SEQ ID NO: 433, SEQ ID NO: 435 or SEQ ID NO: 441 and thus encoding a polypeptide of the present invention, in particular a polypeptide leading by reducing, decreasing or deleting its biological activity to an increase in the fine chemical in an organism. Advantageously, the nucleic acid molecule of the invention comprises, or in an other embodiment has, a nucleotide sequence encoding a protein comprising, or in an other embodiment having, an amino acid sequence shown in SEQ ID NO: 2, SEQ ID NO: 4, SEQ ID NO: 6, SEQ ID NO: 8, SEQ ID NO: 10, SEQ ID NO: 12, SEQ ID NO: 14, SEQ ID NO: 16, SEQ ID NO: 20, SEQ ID NO: 22, SEQ ID NO: 24, SEQ ID NO: 26, SEQ ID NO: 28, SEQ ID NO. 30, SEQ ID NO: 32; SEQ ID NO: 65, SEQ ID NO: 67, SEQ ID NO: 69, SEQ ID NO: 71, SEQ ID NO: 73, SEQ ID NO: 75, SEQ ID NO: 77, SEQ ID NO: 79, SEQ ID NO: 81, SEQ ID NO: 83, SEQ ID NO: 85, SEQ ID NO: 87, SEQ ID NO: 89, SEQ ID NO: 91, SEQ ID NO: 93, SEQ ID NO: 95, SEQ ID NO: 97, SEQ ID NO: 99, SEQ ID NO: 101, SEQ ID NO: 103, SEQ ID NO: 105, SEQ ID NO: 107, SEQ ID NO: 109, SEQ ID NO: 111, SEQ ID NO: 113, SEQ ID NO: 115, SEQ ID NO: 117, SEQ ID NO: 119, SEQ ID NO: 121, SEQ ID NO: 123, SEQ ID NO: 125, SEQ ID NO: 127, SEQ ID NO: 129, SEQ ID NO: 131, SEQ ID NO: 133, SEQ ID NO: 135, SEQ ID NO: 137, SEQ ID NO: 139, SEQ ID NO: 141, SEQ ID NO: 143, SEQ ID NO: 152, SEQ ID NO: 154, SEQ ID NO: 156, SEQ ID NO: 158, SEQ ID NO: 160, SEQ ID NO: 162, SEQ ID NO: 164, SEQ ID NO: 166, SEQ ID NO: 168, SEQ ID NO: 170, SEQ ID NO: 172, SEQ ID NO: 174, SEQ ID NO: 176, SEQ ID NO: 178, SEQ ID NO: 180, SEQ ID NO: 182, SEQ ID NO: 184, SEQ ID NO: 186, SEQ ID NO: 188, SEQ ID NO: 190, SEQ ID NO: 192, SEQ ID NO: 194, SEQ ID NO: 196, SEQ ID NO: 198, SEQ ID NO: 200, SEQ ID NO: 202, SEQ ID NO: 204, SEQ ID NO: 206, SEQ ID NO: 208, SEQ ID NO: 210, SEQ ID NO: 212, SEQ ID NO: 214, SEQ ID NO: 216, SEQ ID NO: 218, SEQ ID NO: 220, SEQ ID NO: 229, SEQ ID NO:231, SEQ ID NO:233, SEQ ID NO: 235, SEQ ID NO: 237, SEQ ID NO: 239, SEQ ID NO: 241, SEQ ID NO: 243, SEQ ID NO: 250, SEQ ID NO: 252, SEQ ID NO: 254, SEQ ID NO: 256, SEQ ID NO: 258, SEQ ID NO: 260, SEQ ID NO: 262, SEQ ID NO: 264, SEQ ID NO: 266, SEQ ID NO: 268, SEQ ID NO: 270, SEQ ID NO: 272, SEQ ID NO: 283, SEQ ID NO: 285, SEQ ID NO: 287, SEQ ID NO: 289, SEQ ID NO: 291, SEQ ID NO: 293, SEQ ID NO: 295, SEQ ID NO: 297, SEQ ID NO: 299, SEQ ID NO: 301, SEQ ID NO: 303, SEQ ID NO: 305, SEQ ID NO: 307, SEQ ID NO: 309, SEQ ID NO: 311, SEQ ID NO: 313, SEQ ID NO: 315, SEQ ID NO: 317, SEQ ID NO: 319, SEQ ID NO: 321, SEQ ID NO: 323, SEQ ID NO: 325, SEQ ID NO: 327, SEQ ID NO: 329, SEQ ID NO: 331, SEQ ID NO: 333, SEQ ID NO: 335, SEQ ID NO: 337, SEQ ID NO: 339, SEQ ID NO: 341, SEQ ID NO: 343, SEQ ID NO: 345, SEQ ID NO: 347, SEQ ID NO: 349, SEQ ID NO: 351, SEQ ID NO: 353, SEQ ID NO: 355, SEQ ID NO: 357, SEQ ID NO: 359, SEQ ID NO: 361, SEQ ID NO: 363, SEQ ID NO: 365, SEQ ID NO: 367, SEQ ID NO: 369, SEQ ID NO: 371, SEQ ID NO: 373, SEQ ID NO: 375, SEQ ID NO: 377, SEQ ID NO: 379, SEQ ID NO: 381, SEQ ID NO: 383, SEQ ID NO: 385, SEQ ID NO: 387, SEQ ID NO: 389, SEQ ID NO: 391, SEQ ID NO: 393, SEQ ID NO: 395, SEQ ID NO: 397, SEQ ID NO: 399, SEQ ID NO: 401, SEQ ID NO: 403, SEQ ID NO: 405, SEQ ID NO: 407, SEQ ID NO: 409, SEQ ID NO: 411, SEQ ID NO: 413, SEQ ID NO: 415, SEQ ID NO: 417, SEQ ID NO: 419, SEQ ID NO: 421, SEQ ID NO: 423, SEQ ID NO: 425, SEQ ID NO: 427, SEQ ID NO: 429, SEQ ID NO: 431, SEQ ID NO: 433, SEQ ID NO: 435 or SEQ ID NO: 441, which differ from said amino acid sequences in at least one or more amino acids.

[0285] In addition, it will be appreciated by those skilled in the art that DNA sequence polymorphisms that lead to changes in the amino acid sequences may exist within a population. Such genetic polymorphism in the gene encoding the polypeptide of the invention or comprising the nucleic acid molecule of the invention may exist among individuals within a population due to natural variation.

[0286] As used herein, the terms “gene” and “recombinant gene” refer to nucleic acid molecules comprising an open reading frame encoding the polypeptide of the invention or comprising the nucleic acid molecule of the invention, preferably encoding the polypeptide of the invention or comprising the nucleic acid molecule of the invention derived from a crop plant or from a microorganism useful for the production of fine chemicals, in particular encoding the polypeptide of the invention or comprising the nucleic acid molecule of the invention derived from a crop plant or a microorganism for the production of the fine chemical. Such natural variations can typically result in 1-5% variance in the nucleotide sequence of the gene used in the inventive process. Any and all such nucleotide variations and resulting amino acid polymorphisms in genes encoding a polypeptide of the invention or comprising the nucleic acid molecule of the invention that are the result of natural variation and that in the event of reducing, decreasing or deleting its biological activity do not alter the functional activity as described are intended to be within the scope of the invention.

[0287] Nucleic acid molecules corresponding to natural variants homologues of a nucleic acid molecule of the invention, which can also be a cDNA, can be isolated based on their homology to the nucleic acid molecules disclosed herein using the nucleic acid molecule of the invention, or a portion thereof, as a hybridization probe according to standard hybridization techniques under stringent hybridization conditions.

[0288] Accordingly, in another embodiment, a nucleic acid molecule of the invention is at least 15, 20, 25 or 30 nucleotides in length. Preferably, it hybridizes under stringent conditions to a nucleic acid molecule comprising a nucleotide sequence of the nucleic acid molecule of the present invention, e.g. comprising the sequence shown in SEQ ID NO: 1, SEQ ID NO: 3, SEQ ID NO: 5, SEQ ID NO: 7, SEQ ID NO: 9, SEQ ID NO: 11, SEQ ID NO: 13, SEQ ID NO: 15, SEQ ID NO: 19, SEQ ID NO: 21, SEQ ID NO: 23, SEQ ID NO: 25, SEQ ID NO: 27, SEQ ID NO: 29, SEQ ID NO: 31; SEQ ID NO: 64, SEQ ID NO: 66, SEQ ID NO: 68, SEQ ID NO: 70, SEQ ID NO: 72, SEQ ID NO: 74, SEQ ID NO: 76, SEQ ID NO: 78, SEQ ID NO: 80, SEQ ID NO: 82, SEQ ID NO: 84, SEQ ID NO: 86, SEQ ID NO: 88, SEQ ID NO: 90, SEQ ID NO: 92, SEQ ID NO: 94, SEQ ID NO: 96, SEQ ID NO: 98, SEQ ID NO: 100, SEQ ID NO: 102, SEQ ID NO: 104, SEQ ID NO: 106, SEQ ID NO: 108, SEQ ID NO: 110, SEQ ID NO: 112, SEQ ID NO: 114, SEQ ID NO: 116, SEQ ID NO: 118, SEQ ID NO: 120, SEQ ID NO: 122, SEQ ID NO: 124, SEQ ID NO: 126, SEQ ID NO: 128, SEQ ID NO: 130, SEQ ID NO: 132, SEQ ID NO: 134, SEQ ID NO: 136, SEQ ID NO: 138, SEQ ID NO: 140, SEQ ID NO: , SEQ ID NO: 142, SEQ ID NO: 151, SEQ ID NO: 153, SEQ ID NO: 155, SEQ ID NO: 157, SEQ ID NO: 159, SEQ ID NO: 161, SEQ ID NO: 163, SEQ ID NO: 165, SEQ ID NO: 167, SEQ ID NO: 169, SEQ ID NO: 171, SEQ ID NO: 173, SEQ ID NO: 175, SEQ ID NO: 177, SEQ ID NO: 179, SEQ ID NO: 181, SEQ ID NO: 183, SEQ ID NO: 185, SEQ ID NO: 187, SEQ ID NO: 189, SEQ ID NO: 191, SEQ ID NO: 193, SEQ ID NO: 195, SEQ ID NO: 197, SEQ ID NO: 199, SEQ ID NO: 201, SEQ ID NO: 203, SEQ ID NO: 205, SEQ ID NO: 207, SEQ ID NO: 209, SEQ ID NO: 211, SEQ ID NO: 213, SEQ ID NO: 215, SEQ ID NO: 217, SEQ ID NO: 219, SEQ ID NO: 228, SEQ ID NO: 230, SEQ ID NO: 232, SEQ ID NO: 234, SEQ ID NO: 236, SEQ ID NO: 238, SEQ ID NO: 240, SEQ ID NO: 242, SEQ ID NO: 249, SEQ ID NO: 251, SEQ ID NO: 253, SEQ ID NO: 255, SEQ ID NO: 257, SEQ ID NO: 259, SEQ ID NO: 261, SEQ ID NO: 263, SEQ ID NO: 265, SEQ ID NO: 267, SEQ ID NO: 269, SEQ ID NO: 271, SEQ ID NO: 282, SEQ ID NO: 284, SEQ ID NO: 286, SEQ ID NO: 288, SEQ ID NO: 290, SEQ ID NO: 292, SEQ ID NO: 294, SEQ ID NO: 296, SEQ ID NO: 298, SEQ ID NO: 300, SEQ ID NO: 302, SEQ ID NO: 304, SEQ ID NO: 306, SEQ ID NO: 308, SEQ ID NO: 310, SEQ ID NO: 312, SEQ ID NO: 314, SEQ ID NO: 316, SEQ ID NO: 318, SEQ ID NO: 320, SEQ ID NO: 322, SEQ ID NO: 324, SEQ ID NO: 326, SEQ ID NO: 328, SEQ ID NO: 330, SEQ ID NO: 332, SEQ ID NO: 334, SEQ ID NO: 336, SEQ ID NO: 338, SEQ ID NO: 340, SEQ ID NO: 342, SEQ ID NO: 344, SEQ ID NO: 346, SEQ ID NO: 348, SEQ ID NO: 350, SEQ ID NO: 352, SEQ ID NO: 354, SEQ ID NO: 356, SEQ ID NO: 358, SEQ ID NO: 360, SEQ ID NO: 362, SEQ ID NO: 364, SEQ ID NO: 366, SEQ ID NO: 368, SEQ ID NO: 370, SEQ ID NO: 372, SEQ ID NO: 374, SEQ ID NO: 376, SEQ ID NO: 378, SEQ ID NO: 380, SEQ ID NO: 382, SEQ ID NO: 384, SEQ ID NO: 386, SEQ ID NO: 388, SEQ ID NO: 390, SEQ ID NO: 392, SEQ ID NO: 394, SEQ ID NO: 396, SEQ ID NO: 398, SEQ ID NO: 400, SEQ ID NO: 402, SEQ ID NO: 404, SEQ ID NO: 406, SEQ ID NO: 408, SEQ ID NO: 410, SEQ ID NO: 412, SEQ ID NO: 414, SEQ ID NO: 416, SEQ ID NO: 418, SEQ ID NO: 420, SEQ ID NO: 422, SEQ ID NO: 424, SEQ ID NO: 426, SEQ ID NO: 428, SEQ ID NO: 430, SEQ ID NO: 432, SEQ ID NO: 434 or SEQ ID NO: 440. The nucleic acid molecule is preferably at least 20, 30, 50, 100, 250 or more nucleotides in length.

[0289] The term “hybridizes under stringent conditions” is defined above. In one embodiment, the term “hybridizes under stringent conditions” is intended to describe conditions for hybridization and washing under which nucleotide sequences of at least 30%, 40%, 50% or 65% identical to each other typically remain hybridized to each other. Preferably, the conditions are such that sequences of at least about 70%, more preferably at least about 75% or 80%, and even more preferably of at least about 85%, 90% or 95% or more identical to each other typically remain hybridized to each other.

[0290] Preferably, nucleic acid molecule of the invention that hybridizes under stringent conditions to a sequence of SEQ ID NO: 1, SEQ ID NO: 3, SEQ ID NO: 5, SEQ ID NO: 7, SEQ ID NO: 9, SEQ ID NO: 11, SEQ ID NO: 13, SEQ ID NO: 15, SEQ ID NO: 19, SEQ ID NO: 21, SEQ ID NO: 23, SEQ ID NO: 25, SEQ ID NO: 27, SEQ ID NO: 29 or SEQ ID NO: 31 corresponds to a naturally-occurring nucleic acid molecule of the invention. As used herein, a “naturally-occurring” nucleic acid molecule refers to a RNA or DNA molecule having a nucleotide sequence that occurs in nature (e.g., encodes a natural protein). Preferably, the nucleic acid molecule encodes a natural protein having above-mentioned activity, e.g. conferring increase of the fine chemical after reducing, decreasing or deleting the expression or activity thereof or the activity of a protein having the biological activity of the protein of the invention.

[0291] In addition to naturally-occurring variants of the nucleic acid or protein sequence of the invention that may exist in the population, the skilled artisan will further appreciate that changes can be introduced by mutation into a nucleotide sequence of the nucleic acid molecule encoding the polypeptide of the invention, thereby leading to changes in the amino acid sequence of the encoded polypeptide of the invention and thereby altering the functional ability of the polypeptide, meaning preferably reducing, decreasing or deleting said activity. For example, nucleotide substitutions leading to amino acid substitutions at “essential” amino acid residues can be made in a sequence of the nucleic acid molecule of the invention, e.g. in SEQ ID NO: 1, SEQ ID NO: 3, SEQ ID NO: 5, SEQ ID NO: 7, SEQ ID NO: 9, SEQ ID NO: 11, SEQ ID NO: 13, SEQ ID NO: 15, SEQ ID NO: 19, SEQ ID NO: 21, SEQ ID NO: 23, SEQ ID NO: 25, SEQ ID NO: 27, SEQ ID NO: 29, SEQ ID NO: 31; SEQ ID NO: 64, SEQ ID NO: 66, SEQ ID NO: 68, SEQ ID NO: 70, SEQ ID NO: 72, SEQ ID NO: 74, SEQ ID NO: 76, SEQ ID NO: 78, SEQ ID NO: 80, SEQ ID NO: 82, SEQ ID NO: 94, SEQ ID NO: 86, SEQ ID NO: 88, SEQ ID NO: 90, SEQ ID NO: 92, SEQ ID NO: 94, SEQ ID NO: 96, SEQ ID NO: 98, SEQ ID NO: 100, SEQ ID NO: 102, SEQ ID NO: 104, SEQ ID NO: 106, SEQ ID NO: 108, SEQ ID NO: 110, SEQ ID NO: 112, SEQ ID NO: 114, SEQ ID NO: 116, SEQ ID NO: 118, SEQ ID NO: 120, SEQ ID NO: 122, SEQ ID NO: 124, SEQ ID NO: 126, SEQ ID NO: 128, SEQ ID NO: 130, SEQ ID NO: 132, SEQ ID NO: 134, SEQ ID NO: 136, SEQ ID NO: 138, SEQ ID NO: 140, SEQ ID NO: , SEQ ID NO: 142, SEQ ID NO: 151, SEQ ID NO: 153, SEQ ID NO: 155, SEQ ID NO: 157, SEQ ID NO: 159, SEQ ID NO: 161, SEQ ID NO: 163, SEQ ID NO: 165, SEQ ID NO: 167, SEQ ID NO: 169, SEQ ID NO: 171, SEQ ID NO: 173, SEQ ID NO: 175, SEQ ID NO: 177, SEQ ID NO: 179, SEQ ID NO: 181, SEQ ID NO: 183, SEQ ID NO: 185, SEQ ID NO: 187, SEQ ID NO: 189, SEQ ID NO: 191, SEQ ID NO: 193, SEQ ID NO: 195, SEQ ID NO: 197, SEQ ID NO: 199, SEQ ID NO: 201, SEQ ID NO: 203, SEQ ID NO: 205, SEQ ID NO: 207, SEQ ID NO: 209, SEQ ID NO: 211, SEQ ID NO: 213, SEQ ID NO: 215, SEQ ID NO: 217, SEQ ID NO: 219, SEQ ID NO: 228, SEQ ID NO: 230, SEQ ID NO: 232, SEQ ID NO: 234, SEQ ID NO: 236, SEQ ID NO: 238, SEQ ID NO: 240, SEQ ID NO: 242, SEQ ID NO: 249, SEQ ID NO: 251, SEQ ID NO: 253, SEQ ID NO: 255, SEQ ID NO: 257, SEQ ID NO: 259, SEQ ID NO: 261, SEQ ID NO: 263, SEQ ID NO: 265, SEQ ID NO: 267, SEQ ID NO: 269, SEQ ID NO: 271, SEQ ID NO: 282, SEQ ID NO: 284, SEQ ID NO: 286, SEQ ID NO: 288, SEQ ID NO: 290, SEQ ID NO: 292, SEQ ID NO: 294, SEQ ID NO: 296, SEQ ID NO: 298, SEQ ID NO: 300, SEQ ID NO: 302, SEQ ID NO: 304, SEQ ID NO: 306, SEQ ID NO: 308, SEQ ID NO: 310, SEQ ID NO: 312, SEQ ID NO: 314, SEQ ID NO: 316, SEQ ID NO: 318, SEQ ID NO: 320, SEQ ID NO: 322, SEQ ID NO: 324, SEQ ID NO: 326, SEQ ID NO: 328, SEQ ID NO: 330, SEQ ID NO: 332, SEQ ID NO: 334, SEQ ID NO: 336, SEQ ID NO: 338, SEQ ID NO: 340, SEQ ID NO: 342, SEQ ID NO: 344, SEQ ID NO: 346, SEQ ID NO: 348, SEQ ID NO: 350, SEQ ID NO: 352, SEQ ID NO: 354, SEQ ID NO: 356, SEQ ID NO: 358, SEQ ID NO: 360, SEQ ID NO: 362, SEQ ID NO: 364, SEQ ID NO: 366, SEQ ID NO: 368, SEQ ID NO: 370, SEQ ID NO: 372, SEQ ID NO: 374, SEQ ID NO: 376, SEQ ID NO: 378, SEQ ID NO: 380, SEQ ID NO: 382, SEQ ID NO: 384, SEQ ID NO: 386, SEQ ID NO: 388, SEQ ID NO: 390, SEQ ID NO: 392, SEQ ID NO: 394, SEQ ID NO: 396, SEQ ID NO: 398, SEQ ID NO: 400, SEQ ID NO: 402, SEQ ID NO: 404, SEQ ID NO: 406, SEQ ID NO: 408, SEQ ID NO: 410, SEQ ID NO: 412, SEQ ID NO: 414, SEQ ID NO: 416, SEQ ID NO: 418, SEQ ID NO: 420, SEQ ID NO: 422, SEQ ID NO: 424, SEQ ID NO: 426, SEQ ID NO: 428, SEQ ID NO: 430, SEQ ID NO: 432, SEQ ID NO: 434 or SEQ ID NO: 440. An “essential” amino acid residue is a residue that if altered from the wild-type sequence of one of the polypeptide of the invention lead to an altered activity of said polypeptide, whereas a “non-essential” amino acid residue is not required for the activity of the protein for example for the activity as an enzyme. The alteration of “essential” residues lead to a reduced decreased or deleted activity of the polypeptides of the invention. Preferably amino acids of the polypeptide of the invention are change in such a manner that the activity is reduced, decreased or deleted that means preferably essential amino acid residues and/or more non-essential residues are changed and thereby the activity is reduced, which leads as mentioned above to an increase in the fine chemical in an organism after decreasing the expression or activity of the polypeptide of the invention. Other amino acid residues, however, (e.g., those that are not conserved or only semiconserved in the domain having said activity) may not be essential for activity and thus are likely to be amenable to alteration without altering said activity are less preferred.

[0292] Further, a person skilled in the art knows that the codon usage between organisms can differ. Therefore, he will adapt the codon usage in the nucleic acid molecule of the present invention to the usage of the organism in which the polynucleotide or polypeptide is expressed, so that the expression of the nucleic acid molecule or the encoded protein of the invention is more likely reduced.

[0293] Accordingly, the invention relates to nucleic acid molecules encoding polypeptide having abovementioned activity, e.g. conferring an increase in the fine chemical content in an organism or parts thereof that contain changes in amino acid residues that are essential for said activity. Such polypeptides differ in amino acid sequence from a sequence contained in SEQ ID NO: 2, SEQ ID NO: 4, SEQ ID NO: 6, SEQ ID NO: 8, SEQ ID NO: 10, SEQ ID NO: 12, SEQ ID NO: 14, SEQ ID NO: 16, SEQ ID NO: 20, SEQ ID NO: 22, SEQ ID NO: 24, SEQ ID NO: 26, SEQ ID NO: 28, SEQ ID NO. 30, SEQ ID NO: 32; SEQ ID NO: 65, SEQ ID NO: 67, SEQ ID NO: 69, SEQ ID NO: 71, SEQ ID NO: 73, SEQ ID NO: 75, SEQ ID NO: 77, SEQ ID NO: 79, SEQ ID NO: 81, SEQ ID NO: 83, SEQ ID NO: 85, SEQ ID NO: 87, SEQ ID NO: 89, SEQ ID NO: 91, SEQ ID NO: 93, SEQ ID NO: 95, SEQ ID NO: 97, SEQ ID NO: 99, SEQ ID NO: 101, SEQ ID NO: 103, SEQ ID NO: 105, SEQ ID NO: 107, SEQ ID NO: 109, SEQ ID NO: 111, SEQ ID NO: 113, SEQ ID NO: 115, SEQ ID NO: 117, SEQ ID NO: 119, SEQ ID NO: 121, SEQ ID NO: 123, SEQ ID NO: 125, SEQ ID NO: 127, SEQ ID NO: 129, SEQ ID NO: 131, SEQ ID NO: 133, SEQ ID NO: 135, SEQ ID NO: 137, SEQ ID NO: 139, SEQ ID NO: 141, SEQ ID NO: 143, SEQ ID NO: 152, SEQ ID NO: 154, SEQ ID NO: 156, SEQ ID NO: 158, SEQ ID NO: 160, SEQ ID NO: 162, SEQ ID NO: 164, SEQ ID NO: 166, SEQ ID NO: 168, SEQ ID NO: 170, SEQ ID NO: 172, SEQ ID NO: 174, SEQ ID NO: 176, SEQ ID NO: 178, SEQ ID NO: 180, SEQ ID NO: 182, SEQ ID NO: 184, SEQ ID NO: 186, SEQ ID NO: 188, SEQ ID NO: 190, SEQ ID NO: 192, SEQ ID NO: 194, SEQ ID NO: 196, SEQ ID NO: 198, SEQ ID NO: 200, SEQ ID NO: 202, SEQ ID NO: 204, SEQ ID NO: 206, SEQ ID NO: 208, SEQ ID NO: 210, SEQ ID NO: 212, SEQ ID NO: 214, SEQ ID NO: 216, SEQ ID NO: 218, SEQ ID NO: 220, SEQ ID NO: 229, SEQ ID NO:231, SEQ ID NO:233, SEQ ID NO: 235, SEQ ID NO: 237, SEQ ID NO: 239, SEQ ID NO: 241, SEQ ID NO: 243, SEQ ID NO: 250, SEQ ID NO: 252, SEQ ID NO: 254, SEQ ID NO: 256, SEQ ID NO: 258, SEQ ID NO: 260, SEQ ID NO: 262, SEQ ID NO: 264, SEQ ID NO: 266, SEQ ID NO: 268, SEQ ID NO: 270, SEQ ID NO: 272, SEQ ID NO: 283, SEQ ID NO: 285, SEQ ID NO: 287, SEQ ID NO: 289, SEQ ID NO: 291, SEQ ID NO: 293, SEQ ID NO: 295, SEQ ID NO: 297, SEQ ID NO: 299, SEQ ID NO: 301, SEQ ID NO: 303, SEQ ID NO: 305, SEQ ID NO: 307, SEQ ID NO: 309, SEQ ID NO: 311, SEQ ID NO: 313, SEQ ID NO: 315, SEQ ID NO: 317, SEQ ID NO: 319, SEQ ID NO: 321, SEQ ID NO: 323, SEQ ID NO: 325, SEQ ID NO: 327, SEQ ID NO: 329, SEQ ID NO: 331, SEQ ID NO: 333, SEQ ID NO: 335, SEQ ID NO: 337, SEQ ID NO: 339, SEQ ID NO: 341, SEQ ID NO: 343, SEQ ID NO: 345, SEQ ID NO: 347, SEQ ID NO: 349, SEQ ID NO: 351, SEQ ID NO: 353, SEQ ID NO: 355, SEQ ID NO: 357, SEQ ID NO: 359, SEQ ID NO: 361, SEQ ID NO: 363, SEQ ID NO: 365, SEQ ID NO: 367, SEQ ID NO: 369, SEQ ID NO: 371, SEQ ID NO: 373, SEQ ID NO: 375, SEQ ID NO: 377, SEQ ID NO: 379, SEQ ID NO: 381, SEQ ID NO: 383, SEQ ID NO: 385, SEQ ID NO: 387, SEQ ID NO: 389, SEQ ID NO: 391, SEQ ID NO: 393, SEQ ID NO: 395, SEQ ID NO: 397, SEQ ID NO: 399, SEQ ID NO: 401, SEQ ID NO: 403, SEQ ID NO: 405, SEQ ID NO: 407, SEQ ID NO: 409, SEQ ID NO: 411, SEQ ID NO: 413, SEQ ID NO: 415, SEQ ID NO: 417, SEQ ID NO: 419, SEQ ID NO: 421, SEQ ID NO: 423, SEQ ID NO: 425, SEQ ID NO: 427, SEQ ID NO: 429, SEQ ID NO: 431, SEQ ID NO: 433, SEQ ID NO: 435 or SEQ ID NO: 441 yet do not retain said biological activity described herein and thereby enabling the fine chemical production. The nucleic acid molecule can comprise a nucleotide sequence encoding a polypeptide, wherein the polypeptide comprises an amino acid sequence at least about 50% identical to an amino acid sequence of SEQ ID NO: 2, SEQ ID NO: 4, SEQ ID NO: 6, SEQ ID NO: 8, SEQ ID NO: 10, SEQ ID NO: 12, SEQ ID NO: 14, SEQ ID NO: 16, SEQ ID NO: 20, SEQ ID NO: 22, SEQ ID NO: 24, SEQ ID NO: 26, SEQ ID NO: 28, SEQ ID NO. 30, SEQ ID NO: 32; SEQ ID NO: 65, SEQ ID NO: 67, SEQ ID NO: 69, SEQ ID NO: 71, SEQ ID NO: 73, SEQ ID NO: 75, SEQ ID NO: 77, SEQ ID NO: 79, SEQ ID NO: 81, SEQ ID NO: 83, SEQ ID NO: 85, SEQ ID NO: 87, SEQ ID NO: 89, SEQ ID NO: 91, SEQ ID NO: 93, SEQ ID NO: 95, SEQ ID NO: 97, SEQ ID NO: 99, SEQ ID NO: 101, SEQ ID NO: 103, SEQ ID NO: 105, SEQ ID NO: 107, SEQ ID NO: 109, SEQ ID NO: 111, SEQ ID NO: 113, SEQ ID NO: 115, SEQ ID NO: 117, SEQ ID NO: 119, SEQ ID NO: 121, SEQ ID NO: 123, SEQ ID NO: 125, SEQ ID NO: 127, SEQ ID NO: 129, SEQ ID NO: 131, SEQ ID NO: 133, SEQ ID NO: 135, SEQ ID NO: 137, SEQ ID NO: 139, SEQ ID NO: 141, SEQ ID NO: 143, SEQ ID NO: 152, SEQ ID NO: 154, SEQ ID NO: 156, SEQ ID NO: 158, SEQ ID NO: 160, SEQ ID NO: 162, SEQ ID NO: 164, SEQ ID NO: 166, SEQ ID NO: 168, SEQ ID NO: 170, SEQ ID NO: 172, SEQ ID NO: 174, SEQ ID NO: 176, SEQ ID NO: 178, SEQ ID NO: 180, SEQ ID NO: 182, SEQ ID NO: 184, SEQ ID NO: 186, SEQ ID NO: 188, SEQ ID NO: 190, SEQ ID NO: 192, SEQ ID NO: 194, SEQ ID NO: 196, SEQ ID NO: 198, SEQ ID NO: 200, SEQ ID NO: 202, SEQ ID NO: 204, SEQ ID NO: 206, SEQ ID NO: 208, SEQ ID NO: 210, SEQ ID NO: 212, SEQ ID NO: 214, SEQ ID NO: 216, SEQ ID NO: 218, SEQ ID NO: 220, SEQ ID NO: 229, SEQ ID NO:231, SEQ ID NO:233, SEQ ID NO: 235, SEQ ID NO: 237, SEQ ID NO: 239, SEQ ID NO: 241, SEQ ID NO: 243, SEQ ID NO: 250, SEQ ID NO: 252, SEQ ID NO: 254, SEQ ID NO: 256, SEQ ID NO: 258, SEQ ID NO: 260, SEQ ID NO: 262, SEQ ID NO: 264, SEQ ID NO: 266, SEQ ID NO: 268, SEQ ID NO: 270, SEQ ID NO: 272, SEQ ID NO: 283, SEQ ID NO: 285, SEQ ID NO: 287, SEQ ID NO: 289, SEQ ID NO: 291, SEQ ID NO: 293, SEQ ID NO: 295, SEQ ID NO: 297, SEQ ID NO: 299, SEQ ID NO: 301, SEQ ID NO: 303, SEQ ID NO: 305, SEQ ID NO: 307, SEQ ID NO: 309, SEQ ID NO: 311, SEQ ID NO: 313, SEQ ID NO: 315, SEQ ID NO: 317, SEQ ID NO: 319, SEQ ID NO: 321, SEQ ID NO: 323, SEQ ID NO: 325, SEQ ID NO: 327, SEQ ID NO: 329, SEQ ID NO: 331, SEQ ID NO: 333, SEQ ID NO: 335, SEQ ID NO: 337, SEQ ID NO: 339, SEQ ID NO: 341, SEQ ID NO: 343, SEQ ID NO: 345, SEQ ID NO: 347, SEQ ID NO: 349, SEQ ID NO: 351, SEQ ID NO: 353, SEQ ID NO: 355, SEQ ID NO: 357, SEQ ID NO: 359, SEQ ID NO: 361, SEQ ID NO: 363, SEQ ID NO: 365, SEQ ID NO: 367, SEQ ID NO: 369, SEQ ID NO: 371, SEQ ID NO: 373, SEQ ID NO: 375, SEQ ID NO: 377, SEQ ID NO: 379, SEQ ID NO: 381, SEQ ID NO: 383, SEQ ID NO: 385, SEQ ID NO: 387, SEQ ID NO: 389, SEQ ID NO: 391, SEQ ID NO: 393, SEQ ID NO: 395, SEQ ID NO: 397, SEQ ID NO: 399, SEQ ID NO: 401, SEQ ID NO: 403, SEQ ID NO: 405, SEQ ID NO: 407, SEQ ID NO: 409, SEQ ID NO: 411, SEQ ID NO: 413, SEQ ID NO: 415, SEQ ID NO: 417, SEQ ID NO: 419, SEQ ID NO: 421, SEQ ID NO: 423, SEQ ID NO: 425, SEQ ID NO: 427, SEQ ID NO: 429, SEQ ID NO: 431, SEQ ID NO: 433, SEQ ID NO: 435 or SEQ ID NO: 441 and is capable of participation in the increase of the fine chemical production after decreasing its expression or its biological function. Preferably, the protein encoded by the nucleic acid molecule is at least about 60%, 70% or 80% identical to the sequence in SEQ ID NO: 2, SEQ ID NO: 4, SEQ ID NO: 6, SEQ ID NO: 8, SEQ ID NO: 10, SEQ ID NO: 12, SEQ ID NO: 14, SEQ ID NO: 16, SEQ ID NO: 20, SEQ ID NO: 22, SEQ ID NO: 24, SEQ ID NO: 26, SEQ ID NO: 28, SEQ ID NO. 30, SEQ ID NO: 32; SEQ ID NO: 65, SEQ ID NO: 67, SEQ ID NO: 69, SEQ ID NO: 71, SEQ ID NO: 73, SEQ ID NO: 75, SEQ ID NO: 77, SEQ ID NO: 79, SEQ ID NO: 81, SEQ ID NO: 83, SEQ ID NO: 85, SEQ ID NO: 87, SEQ ID NO: 89, SEQ ID NO: 91, SEQ ID NO: 93, SEQ ID NO: 95, SEQ ID NO: 97, SEQ ID NO: 99, SEQ ID NO: 101, SEQ ID NO: 103, SEQ ID NO: 105, SEQ ID NO: 107, SEQ ID NO: 109, SEQ ID NO: 111, SEQ ID NO: 113, SEQ ID NO: 115, SEQ ID NO: 117, SEQ ID NO: 119, SEQ ID NO: 121, SEQ ID NO: 123, SEQ ID NO: 125, SEQ ID NO: 127, SEQ ID NO: 129, SEQ ID NO: 131, SEQ ID NO: 133, SEQ ID NO: 135, SEQ ID NO: 137, SEQ ID NO: 139, SEQ ID NO: 141, SEQ ID NO: 143, SEQ ID NO: 152, SEQ ID NO: 154, SEQ ID NO: 156, SEQ ID NO: 158, SEQ ID NO: 160, SEQ ID NO: 162, SEQ ID NO: 164, SEQ ID NO: 166, SEQ ID NO: 168, SEQ ID NO: 170, SEQ ID NO: 172, SEQ ID NO: 174, SEQ ID NO: 176, SEQ ID NO: 178, SEQ ID NO: 180, SEQ ID NO: 182, SEQ ID NO: 184, SEQ ID NO: 186, SEQ ID NO: 188, SEQ ID NO: 190, SEQ ID NO: 192, SEQ ID NO: 194, SEQ ID NO: 196, SEQ ID NO: 198, SEQ ID NO: 200, SEQ ID NO: 202, SEQ ID NO: 204, SEQ ID NO: 206, SEQ ID NO: 208, SEQ ID NO: 210, SEQ ID NO: 212, SEQ ID NO: 214, SEQ ID NO: 216, SEQ ID NO: 218, SEQ ID NO: 220, SEQ ID NO: 229, SEQ ID NO:231, SEQ ID NO:233, SEQ ID NO: 235, SEQ ID NO: 237, SEQ ID NO: 239, SEQ ID NO: 241, SEQ ID NO: 243, SEQ ID NO: 250, SEQ ID NO: 252, SEQ ID NO: 254, SEQ ID NO: 256, SEQ ID NO: 258, SEQ ID NO: 260, SEQ ID NO: 262, SEQ ID NO: 264, SEQ ID NO: 266, SEQ ID NO: 268, SEQ ID NO: 270, SEQ ID NO: 272, SEQ ID NO: 283, SEQ ID NO: 285, SEQ ID NO: 287, SEQ ID NO: 289, SEQ ID NO: 291, SEQ ID NO: 293, SEQ ID NO: 295, SEQ ID NO: 297, SEQ ID NO: 299, SEQ ID NO: 301, SEQ ID NO: 303, SEQ ID NO: 305, SEQ ID NO: 307, SEQ ID NO: 309, SEQ ID NO: 311, SEQ ID NO: 313, SEQ ID NO: 315, SEQ ID NO: 317, SEQ ID NO: 319, SEQ ID NO: 321, SEQ ID NO: 323, SEQ ID NO: 325, SEQ ID NO: 327, SEQ ID NO: 329, SEQ ID NO: 331, SEQ ID NO: 333, SEQ ID NO: 335, SEQ ID NO: 337, SEQ ID NO: 339, SEQ ID NO: 341, SEQ ID NO: 343, SEQ ID NO: 345, SEQ ID NO: 347, SEQ ID NO: 349, SEQ ID NO: 351, SEQ ID NO: 353, SEQ ID NO: 355, SEQ ID NO: 357, SEQ ID NO: 359, SEQ ID NO: 361, SEQ ID NO: 363, SEQ ID NO: 365, SEQ ID NO: 367, SEQ ID NO: 369, SEQ ID NO: 371, SEQ ID NO: 373, SEQ ID NO: 375, SEQ ID NO: 377, SEQ ID NO: 379, SEQ ID NO: 381, SEQ ID NO: 383, SEQ ID NO: 385, SEQ ID NO: 387, SEQ ID NO: 389, SEQ ID NO: 391, SEQ ID NO: 393, SEQ ID NO: 395, SEQ ID NO: 397, SEQ ID NO: 399, SEQ ID NO: 401, SEQ ID NO: 403, SEQ ID NO: 405, SEQ ID NO: 407, SEQ ID NO: 409, SEQ ID NO: 411, SEQ ID NO: 413, SEQ ID NO: 415, SEQ ID NO: 417, SEQ ID NO: 419, SEQ ID NO: 421, SEQ ID NO: 423, SEQ ID NO: 425, SEQ ID NO: 427, SEQ ID NO: 429, SEQ ID NO: 431, SEQ ID NO: 433, SEQ ID NO: 435 or SEQ ID NO: 441, more preferably at least about 85% identical to one of the sequences in SEQ ID NO: 2, SEQ ID NO: 4, SEQ ID NO: 6, SEQ ID NO: 8, SEQ ID NO: 10, SEQ ID NO: 12, SEQ ID NO: 14, SEQ ID NO: 16, SEQ ID NO: 20, SEQ ID NO: 22, SEQ ID NO: 24, SEQ ID NO: 26, SEQ ID NO: 28, SEQ ID NO. 30, SEQ ID NO: 32; SEQ ID NO: 65, SEQ ID NO: 67, SEQ ID NO: 69, SEQ ID NO: 71, SEQ ID NO: 73, SEQ ID NO: 75, SEQ ID NO: 77, SEQ ID NO: 79, SEQ ID NO: 81, SEQ ID NO: 83, SEQ ID NO: 85, SEQ ID NO: 87, SEQ ID NO: 89, SEQ ID NO: 91, SEQ ID NO: 93, SEQ ID NO: 95, SEQ ID NO: 97, SEQ ID NO: 99, SEQ ID NO: 101, SEQ ID NO: 103, SEQ ID NO: 105, SEQ ID NO: 107, SEQ ID NO: 109, SEQ ID NO: 111, SEQ ID NO: 113, SEQ ID NO: 115, SEQ ID NO: 117, SEQ ID NO: 119, SEQ ID NO: 121, SEQ ID NO: 123, SEQ ID NO: 125, SEQ ID NO: 127, SEQ ID NO: 129, SEQ ID NO: 131, SEQ ID NO: 133, SEQ ID NO: 135, SEQ ID NO: 137, SEQ ID NO: 139, SEQ ID NO: 141, SEQ ID NO: 143, SEQ ID NO: 152, SEQ ID NO: 154, SEQ ID NO: 156, SEQ ID NO: 158, SEQ ID NO: 160, SEQ ID NO: 162, SEQ ID NO: 164, SEQ ID NO: 166, SEQ ID NO: 168, SEQ ID NO: 170, SEQ ID NO: 172, SEQ ID NO: 174, SEQ ID NO: 176, SEQ ID NO: 178, SEQ ID NO: 180, SEQ ID NO: 182, SEQ ID NO: 184, SEQ ID NO: 186, SEQ ID NO: 188, SEQ ID NO: 190, SEQ ID NO: 192, SEQ ID NO: 194, SEQ ID NO: 196, SEQ ID NO: 198, SEQ ID NO: 200, SEQ ID NO: 202, SEQ ID NO: 204, SEQ ID NO: 206, SEQ ID NO: 208, SEQ ID NO: 210, SEQ ID NO: 212, SEQ ID NO: 214, SEQ ID NO: 216, SEQ ID NO: 218, SEQ ID NO: 220, SEQ ID NO: 229, SEQ ID NO:231, SEQ ID NO:233, SEQ ID NO: 235, SEQ ID NO: 237, SEQ ID NO: 239, SEQ ID NO: 241, SEQ ID NO: 243, SEQ ID NO: 250, SEQ ID NO: 252, SEQ ID NO: 254, SEQ ID NO: 256, SEQ ID NO: 258, SEQ ID NO: 260, SEQ ID NO: 262, SEQ ID NO: 264, SEQ ID NO: 266, SEQ ID NO: 268, SEQ ID NO: 270, SEQ ID NO: 272, SEQ ID NO: 283, SEQ ID NO: 285, SEQ ID NO: 287, SEQ ID NO: 289, SEQ ID NO: 291, SEQ ID NO: 293, SEQ ID NO: 295, SEQ ID NO: 297, SEQ ID NO: 299, SEQ ID NO: 301, SEQ ID NO: 303, SEQ ID NO: 305, SEQ ID NO: 307, SEQ ID NO: 309, SEQ ID NO: 311, SEQ ID NO: 313, SEQ ID NO: 315, SEQ ID NO: 317, SEQ ID NO: 319, SEQ ID NO: 321, SEQ ID NO: 323, SEQ ID NO: 325, SEQ ID NO: 327, SEQ ID NO: 329, SEQ ID NO: 331, SEQ ID NO: 333, SEQ ID NO: 335, SEQ ID NO: 337, SEQ ID NO: 339, SEQ ID NO: 341, SEQ ID NO: 343, SEQ ID NO: 345, SEQ ID NO: 347, SEQ ID NO: 349, SEQ ID NO: 351, SEQ ID NO: 353, SEQ ID NO: 355, SEQ ID NO: 357, SEQ ID NO: 359, SEQ ID NO: 361, SEQ ID NO: 363, SEQ ID NO: 365, SEQ ID NO: 367, SEQ ID NO: 369, SEQ ID NO: 371, SEQ ID NO: 373, SEQ ID NO: 375, SEQ ID NO: 377, SEQ ID NO: 379, SEQ ID NO: 381, SEQ ID NO: 383, SEQ ID NO: 385, SEQ ID NO: 387, SEQ ID NO: 389, SEQ ID NO: 391, SEQ ID NO: 393, SEQ ID NO: 395, SEQ ID NO: 397, SEQ ID NO: 399, SEQ ID NO: 401, SEQ ID NO: 403, SEQ ID NO: 405, SEQ ID NO: 407, SEQ ID NO: 409, SEQ ID NO: 411, SEQ ID NO: 413, SEQ ID NO: 415, SEQ ID NO: 417, SEQ ID NO: 419, SEQ ID NO: 421, SEQ ID NO: 423, SEQ ID NO: 425, SEQ ID NO: 427, SEQ ID NO: 429, SEQ ID NO: 431, SEQ ID NO: 433, SEQ ID NO: 435 or SEQ ID NO: 441, even more preferably at least about 90%, 91%, 92%, 93%, 94%, 95% homologous to the sequence in SEQ ID NO: 2, SEQ ID NO: 4, SEQ ID NO: 6, SEQ ID NO: 8, SEQ ID NO: 10, SEQ ID NO: 12, SEQ ID NO: 14, SEQ ID NO: 16, SEQ ID NO: 20, SEQ ID NO: 22, SEQ ID NO: 24, SEQ ID NO: 26, SEQ ID NO: 28, SEQ ID NO. 30, SEQ ID NO: 32; SEQ ID NO: 65, SEQ ID NO: 67, SEQ ID NO: 69, SEQ ID NO: 71, SEQ ID NO: 73, SEQ ID NO: 75, SEQ ID NO: 77, SEQ ID NO: 79, SEQ ID NO: 81, SEQ ID NO: 83, SEQ ID NO: 85, SEQ ID NO: 87, SEQ ID NO: 89, SEQ ID NO: 91, SEQ ID NO: 93, SEQ ID NO: 95, SEQ ID NO: 97, SEQ ID NO: 99, SEQ ID NO: 101, SEQ ID NO: 103, SEQ ID NO: 105, SEQ ID NO: 107, SEQ ID NO: 109, SEQ ID NO: 111, SEQ ID NO: 113, SEQ ID NO: 115, SEQ ID NO: 117, SEQ ID NO: 119, SEQ ID NO: 121, SEQ ID NO: 123, SEQ ID NO: 125, SEQ ID NO: 127, SEQ ID NO: 129, SEQ ID NO: 131, SEQ ID NO: 133, SEQ ID NO: 135, SEQ ID NO: 137, SEQ ID NO: 139, SEQ ID NO: 141, SEQ ID NO: 143, SEQ ID NO: 152, SEQ ID NO: 154, SEQ ID NO: 156, SEQ ID NO: 158, SEQ ID NO: 160, SEQ ID NO: 162, SEQ ID NO: 164, SEQ ID NO: 166, SEQ ID NO: 168, SEQ ID NO: 170, SEQ ID NO: 172, SEQ ID NO: 174, SEQ ID NO: 176, SEQ ID NO: 178, SEQ ID NO: 180, SEQ ID NO: 182, SEQ ID NO: 184, SEQ ID NO: 186, SEQ ID NO: 188, SEQ ID NO: 190, SEQ ID NO: 192, SEQ ID NO: 194, SEQ ID NO: 196, SEQ ID NO: 198, SEQ ID NO: 200, SEQ ID NO: 202, SEQ ID NO: 204, SEQ ID NO: 206, SEQ ID NO: 208, SEQ ID NO: 210, SEQ ID NO: 212, SEQ ID NO: 214, SEQ ID NO: 216, SEQ ID NO: 218, SEQ ID NO: 220, SEQ ID NO: 229, SEQ ID NO:231, SEQ ID NO:233, SEQ ID NO: 235, SEQ ID NO: 237, SEQ ID NO: 239, SEQ ID NO: 241, SEQ ID NO: 243, SEQ ID NO: 250, SEQ ID NO: 252, SEQ ID NO: 254, SEQ ID NO: 256, SEQ ID NO: 258, SEQ ID NO: 260, SEQ ID NO: 262, SEQ ID NO: 264, SEQ ID NO: 266, SEQ ID NO: 268, SEQ ID NO: 270, SEQ ID NO: 272, SEQ ID NO: 283, SEQ ID NO: 285, SEQ ID NO: 287, SEQ ID NO: 289, SEQ ID NO: 291, SEQ ID NO: 293, SEQ ID NO: 295, SEQ ID NO: 297, SEQ ID NO: 299, SEQ ID NO: 301, SEQ ID NO: 303, SEQ ID NO: 305, SEQ ID NO: 307, SEQ ID NO: 309, SEQ ID NO: 311, SEQ ID NO: 313, SEQ ID NO: 315, SEQ ID NO: 317, SEQ ID NO: 319, SEQ ID NO: 321, SEQ ID NO: 323, SEQ ID NO: 325, SEQ ID NO: 327, SEQ ID NO: 329, SEQ ID NO: 331, SEQ ID NO: 333, SEQ ID NO: 335, SEQ ID NO: 337, SEQ ID NO: 339, SEQ ID NO: 341, SEQ ID NO: 343, SEQ ID NO: 345, SEQ ID NO: 347, SEQ ID NO: 349, SEQ ID NO: 351, SEQ ID NO: 353, SEQ ID NO: 355, SEQ ID NO: 357, SEQ ID NO: 359, SEQ ID NO: 361, SEQ ID NO: 363, SEQ ID NO: 365, SEQ ID NO: 367, SEQ ID NO: 369, SEQ ID NO: 371, SEQ ID NO: 373, SEQ ID NO: 375, SEQ ID NO: 377, SEQ ID NO: 379, SEQ ID NO: 381, SEQ ID NO: 383, SEQ ID NO: 385, SEQ ID NO: 387, SEQ ID NO: 389, SEQ ID NO: 391, SEQ ID NO: 393, SEQ ID NO: 395, SEQ ID NO: 397, SEQ ID NO: 399, SEQ ID NO: 401, SEQ ID NO: 403, SEQ ID NO: 405, SEQ ID NO: 407, SEQ ID NO: 409, SEQ ID NO: 411, SEQ ID NO: 413, SEQ ID NO: 415, SEQ ID NO: 417, SEQ ID NO: 419, SEQ ID NO: 421, SEQ ID NO: 423, SEQ ID NO: 425, SEQ ID NO: 427, SEQ ID NO: 429, SEQ ID NO: 431, SEQ ID NO: 433, SEQ ID NO: 435 or SEQ ID NO: 441, and most preferably at least about 96%, 97%, 98%, or 99% identical to the sequence in SEQ ID NO: 2, SEQ ID NO: 4, SEQ ID NO: 6, SEQ ID NO: 8, SEQ ID NO: 10, SEQ ID NO: 12, SEQ ID NO: 14, SEQ ID NO: 16, SEQ ID NO: 20, SEQ ID NO: 22, SEQ ID NO: 24, SEQ ID NO: 26, SEQ ID NO: 28, SEQ ID NO. 30, SEQ ID NO: 32; SEQ ID NO: 65, SEQ ID NO: 67, SEQ ID NO: 69, SEQ ID NO: 71, SEQ ID NO: 73, SEQ ID NO: 75, SEQ ID NO: 77, SEQ ID NO: 79, SEQ ID NO: 81, SEQ ID NO: 83, SEQ ID NO: 85, SEQ ID NO: 87, SEQ ID NO: 89, SEQ ID NO: 91, SEQ ID NO: 93, SEQ ID NO: 95, SEQ ID NO: 97, SEQ ID NO: 99, SEQ ID NO: 101, SEQ ID NO: 103, SEQ ID NO: 105, SEQ ID NO: 107, SEQ ID NO: 109, SEQ ID NO: 111, SEQ ID NO: 113, SEQ ID NO: 115, SEQ ID NO: 117, SEQ ID NO: 119, SEQ ID NO: 121, SEQ ID NO: 123, SEQ ID NO: 125, SEQ ID NO: 127, SEQ ID NO: 129, SEQ ID NO: 131, SEQ ID NO: 133, SEQ ID NO: 135, SEQ ID NO: 137, SEQ ID NO: 139, SEQ ID NO: 141, SEQ ID NO: 143, SEQ ID NO: 152, SEQ ID NO: 154, SEQ ID NO: 156, SEQ ID NO: 158, SEQ ID NO: 160, SEQ ID NO: 162, SEQ ID NO: 164, SEQ ID NO: 166, SEQ ID NO: 168, SEQ ID NO: 170, SEQ ID NO: 172, SEQ ID NO: 174, SEQ ID NO: 176, SEQ ID NO: 178, SEQ ID NO: 180, SEQ ID NO: 182, SEQ ID NO: 184, SEQ ID NO: 186, SEQ ID NO: 188, SEQ ID NO: 190, SEQ ID NO: 192, SEQ ID NO: 194, SEQ ID NO: 196, SEQ ID NO: 198, SEQ ID NO: 200, SEQ ID NO: 202, SEQ ID NO: 204, SEQ ID NO: 206, SEQ ID NO: 208, SEQ ID NO: 210, SEQ ID NO: 212, SEQ ID NO: 214, SEQ ID NO: 216, SEQ ID NO: 218, SEQ ID NO: 220, SEQ ID NO: 229, SEQ ID NO:231, SEQ ID NO:233, SEQ ID NO: 235, SEQ ID NO: 237, SEQ ID NO: 239, SEQ ID NO: 241, SEQ ID NO: 243, SEQ ID NO: 250, SEQ ID NO: 252, SEQ ID NO: 254, SEQ ID NO: 256, SEQ ID NO: 258, SEQ ID NO: 260, SEQ ID NO: 262, SEQ ID NO: 264, SEQ ID NO: 266, SEQ ID NO: 268, SEQ ID NO: 270, SEQ ID NO: 272, SEQ ID NO: 283, SEQ ID NO: 285, SEQ ID NO: 287, SEQ ID NO: 289, SEQ ID NO: 291, SEQ ID NO: 293, SEQ ID NO: 295, SEQ ID NO: 297, SEQ ID NO: 299, SEQ ID NO: 301, SEQ ID NO: 303, SEQ ID NO: 305, SEQ ID NO: 307, SEQ ID NO: 309, SEQ ID NO: 311, SEQ ID NO: 313, SEQ ID NO: 315, SEQ ID NO: 317, SEQ ID NO: 319, SEQ ID NO: 321, SEQ ID NO: 323, SEQ ID NO: 325, SEQ ID NO: 327, SEQ ID NO: 329, SEQ ID NO: 331, SEQ ID NO: 333, SEQ ID NO: 335, SEQ ID NO: 337, SEQ ID NO: 339, SEQ ID NO: 341, SEQ ID NO: 343, SEQ ID NO: 345, SEQ ID NO: 347, SEQ ID NO: 349, SEQ ID NO: 351, SEQ ID NO: 353, SEQ ID NO: 355, SEQ ID NO: 357, SEQ ID NO: 359, SEQ ID NO: 361, SEQ ID NO: 363, SEQ ID NO: 365, SEQ ID NO: 367, SEQ ID NO: 369, SEQ ID NO: 371, SEQ ID NO: 373, SEQ ID NO: 375, SEQ ID NO: 377, SEQ ID NO: 379, SEQ ID NO: 381, SEQ ID NO: 383, SEQ ID NO: 385, SEQ ID NO: 387, SEQ ID NO: 389, SEQ ID NO: 391, SEQ ID NO: 393, SEQ ID NO: 395, SEQ ID NO: 397, SEQ ID NO: 399, SEQ ID NO: 401, SEQ ID NO: 403, SEQ ID NO: 405, SEQ ID NO: 407, SEQ ID NO: 409, SEQ ID NO: 411, SEQ ID NO: 413, SEQ ID NO: 415, SEQ ID NO: 417, SEQ ID NO: 419, SEQ ID NO: 421, SEQ ID NO: 423, SEQ ID NO: 425, SEQ ID NO: 427, SEQ ID NO: 429, SEQ ID NO: 431, SEQ ID NO: 433, SEQ ID NO: 435 or SEQ ID NO: 441.

[0294] To determine the percentage homology (=identity) of two amino acid sequences (for example of SEQ ID NO: 2, SEQ ID NO: 4, SEQ ID NO: 6, SEQ ID NO: 8, SEQ ID NO: 10, SEQ ID NO: 12, SEQ ID NO: 14, SEQ ID NO: 16, SEQ ID NO: 20, SEQ ID NO: 22, SEQ ID NO: 24, SEQ ID NO: 26, SEQ ID NO: 28, SEQ ID NO. 30, SEQ ID NO: 32; SEQ ID NO: 65, SEQ ID NO: 67, SEQ ID NO: 69, SEQ ID NO: 71, SEQ ID NO: 73, SEQ ID NO: 75, SEQ ID NO: 77, SEQ ID NO: 79, SEQ ID NO: 81, SEQ ID NO: 83, SEQ ID NO: 85, SEQ ID NO: 87, SEQ ID NO: 89, SEQ ID NO: 91, SEQ ID NO: 93, SEQ ID NO: 95, SEQ ID NO: 97, SEQ ID NO: 99, SEQ ID NO: 101, SEQ ID NO: 103, SEQ ID NO: 105, SEQ ID NO: 107, SEQ ID NO: 109, SEQ ID NO: 111, SEQ ID NO: 113, SEQ ID NO: 115, SEQ ID NO: 117, SEQ ID NO: 119, SEQ ID NO: 121, SEQ ID NO: 123, SEQ ID NO: 125, SEQ ID NO: 127, SEQ ID NO: 129, SEQ ID NO: 131, SEQ ID NO: 133, SEQ ID NO: 135, SEQ ID NO: 137, SEQ ID NO: 139, SEQ ID NO: 141, SEQ ID NO: 143, SEQ ID NO: 152, SEQ ID NO: 154, SEQ ID NO: 156, SEQ ID NO: 158, SEQ ID NO: 160, SEQ ID NO: 162, SEQ ID NO: 164, SEQ ID NO: 166, SEQ ID NO: 168, SEQ ID NO: 170, SEQ ID NO: 172, SEQ ID NO: 174, SEQ ID NO: 176, SEQ ID NO: 178, SEQ ID NO: 180, SEQ ID NO: 182, SEQ ID NO: 184, SEQ ID NO: 186, SEQ ID NO: 188, SEQ ID NO: 190, SEQ ID NO: 192, SEQ ID NO: 194, SEQ ID NO: 196, SEQ ID NO: 198, SEQ ID NO: 200, SEQ ID NO: 202, SEQ ID NO: 204, SEQ ID NO: 206, SEQ ID NO: 208, SEQ ID NO: 210, SEQ ID NO: 212, SEQ ID NO: 214, SEQ ID NO: 216, SEQ ID NO: 218, SEQ ID NO: 220, SEQ ID NO: 229, SEQ ID NO:231, SEQ ID NO:233, SEQ ID NO: 235, SEQ ID NO: 237, SEQ ID NO: 239, SEQ ID NO: 241, SEQ ID NO: 243, SEQ ID NO: 250, SEQ ID NO: 252, SEQ ID NO: 254, SEQ ID NO: 256, SEQ ID NO: 258, SEQ ID NO: 260, SEQ ID NO: 262, SEQ ID NO: 264, SEQ ID NO: 266, SEQ ID NO: 268, SEQ ID NO: 270, SEQ ID NO: 272, SEQ ID NO: 283, SEQ ID NO: 285, SEQ ID NO: 287, SEQ ID NO: 289, SEQ ID NO: 291, SEQ ID NO: 293, SEQ ID NO: 295, SEQ ID NO: 297, SEQ ID NO: 299, SEQ ID NO: 301, SEQ ID NO: 303, SEQ ID NO: 305, SEQ ID NO: 307, SEQ ID NO: 309, SEQ ID NO: 311, SEQ ID NO: 313, SEQ ID NO: 315, SEQ ID NO: 317, SEQ ID NO: 319, SEQ ID NO: 321, SEQ ID NO: 323, SEQ ID NO: 325, SEQ ID NO: 327, SEQ ID NO: 329, SEQ ID NO: 331, SEQ ID NO: 333, SEQ ID NO: 335, SEQ ID NO: 337, SEQ ID NO: 339, SEQ ID NO: 341, SEQ ID NO: 343, SEQ ID NO: 345, SEQ ID NO: 347, SEQ ID NO: 349, SEQ ID NO: 351, SEQ ID NO: 353, SEQ ID NO: 355, SEQ ID NO: 357, SEQ ID NO: 359, SEQ ID NO: 361, SEQ ID NO: 363, SEQ ID NO: 365, SEQ ID NO: 367, SEQ ID NO: 369, SEQ ID NO: 371, SEQ ID NO: 373, SEQ ID NO: 375, SEQ ID NO: 377, SEQ ID NO: 379, SEQ ID NO: 381, SEQ ID NO: 383, SEQ ID NO: 385, SEQ ID NO: 387, SEQ ID NO: 389, SEQ ID NO: 391, SEQ ID NO: 393, SEQ ID NO: 395, SEQ ID NO: 397, SEQ ID NO: 399, SEQ ID NO: 401, SEQ ID NO: 403, SEQ ID NO: 405, SEQ ID NO: 407, SEQ ID NO: 409, SEQ ID NO: 411, SEQ ID NO: 413, SEQ ID NO: 415, SEQ ID NO: 417, SEQ ID NO: 419, SEQ ID NO: 421, SEQ ID NO: 423, SEQ ID NO: 425, SEQ ID NO: 427, SEQ ID NO: 429, SEQ ID NO: 431, SEQ ID NO: 433, SEQ ID NO: 435 or SEQ ID NO: 441) or of two nucleic acid molecules (for example of the sequence SEQ ID NO: 1, SEQ ID NO: 3, SEQ ID NO: 5, SEQ ID NO: 7, SEQ ID NO: 9, SEQ ID NO: 11, SEQ ID NO: 13, SEQ ID NO: 15, SEQ ID NO: 19, SEQ ID NO: 21, SEQ ID NO: 23, SEQ ID NO: 25, SEQ ID NO: 27, SEQ ID NO: 29, SEQ ID NO: 31; SEQ ID NO: 64, SEQ ID NO: 66, SEQ ID NO: 68, SEQ ID NO: 70, SEQ ID NO: 72, SEQ ID NO: 74, SEQ ID NO: 76, SEQ ID NO: 78, SEQ ID NO: 80, SEQ ID NO: 82, SEQ ID NO: 84, SEQ ID NO: 86, SEQ ID NO: 88, SEQ ID NO: 90, SEQ ID NO: 92, SEQ ID NO: 94, SEQ ID NO: 96, SEQ ID NO: 98, SEQ ID NO: 100, SEQ ID NO: 102, SEQ ID NO: 104, SEQ ID NO: 106, SEQ ID NO: 108, SEQ ID NO: 110, SEQ ID NO: 112, SEQ ID NO: 114, SEQ ID NO: 116, SEQ ID NO: 118, SEQ ID NO: 120, SEQ ID NO: 122, SEQ ID NO: 124, SEQ ID NO: 126, SEQ ID NO: 128, SEQ ID NO: 130, SEQ ID NO: 132, SEQ ID NO: 134, SEQ ID NO: 136, SEQ ID NO: 138, SEQ ID NO: 140, SEQ ID NO: , SEQ ID NO: 142, SEQ ID NO: 151, SEQ ID NO: 153, SEQ ID NO: 155, SEQ ID NO: 157, SEQ ID NO: 159, SEQ ID NO: 161, SEQ ID NO: 163, SEQ ID NO: 165, SEQ ID NO: 167, SEQ ID NO: 169, SEQ ID NO: 171, SEQ ID NO: 173, SEQ ID NO: 175, SEQ ID NO: 177, SEQ ID NO: 179, SEQ ID NO: 181, SEQ ID NO: 183, SEQ ID NO: 185, SEQ ID NO: 187, SEQ ID NO: 189, SEQ ID NO: 191, SEQ ID NO: 193, SEQ ID NO: 195, SEQ ID NO: 197, SEQ ID NO: 199, SEQ ID NO: 201, SEQ ID NO: 203, SEQ ID NO: 205, SEQ ID NO: 207, SEQ ID NO: 209, SEQ ID NO: 211, SEQ ID NO: 213, SEQ ID NO: 215, SEQ ID NO: 217, SEQ ID NO: 219, SEQ ID NO: 228, SEQ ID NO: 230, SEQ ID NO: 232, SEQ ID NO: 234, SEQ ID NO: 236, SEQ ID NO: 238, SEQ ID NO: 240, SEQ ID NO: 242, SEQ ID NO: 249, SEQ ID NO: 251, SEQ ID NO: 253, SEQ ID NO: 255, SEQ ID NO: 257, SEQ ID NO: 259, SEQ ID NO: 261, SEQ ID NO: 263, SEQ ID NO: 265, SEQ ID NO: 267, SEQ ID NO: 269, SEQ ID NO: 271, SEQ ID NO: 282, SEQ ID NO: 284, SEQ ID NO: 286, SEQ ID NO: 288, SEQ ID NO: 290, SEQ ID NO: 292, SEQ ID NO: 294, SEQ ID NO: 296, SEQ ID NO: 298, SEQ ID NO: 300, SEQ ID NO: 302, SEQ ID NO: 304, SEQ ID NO: 306, SEQ ID NO: 308, SEQ ID NO: 310, SEQ ID NO: 312, SEQ ID NO: 314, SEQ ID NO: 316, SEQ ID NO: 318, SEQ ID NO: 320, SEQ ID NO: 322, SEQ ID NO: 324, SEQ ID NO: 326, SEQ ID NO: 328, SEQ ID NO: 330, SEQ ID NO: 332, SEQ ID NO: 334, SEQ ID NO: 336, SEQ ID NO: 338, SEQ ID NO: 340, SEQ ID NO: 342, SEQ ID NO: 344, SEQ ID NO: 346, SEQ ID NO: 348, SEQ ID NO: 350, SEQ ID NO: 352, SEQ ID NO: 354, SEQ ID NO: 356, SEQ ID NO: 358, SEQ ID NO: 360, SEQ ID NO: 362, SEQ ID NO: 364, SEQ ID NO: 366, SEQ ID NO: 368, SEQ ID NO: 370, SEQ ID NO: 372, SEQ ID NO: 374, SEQ ID NO: 376, SEQ ID NO: 378, SEQ ID NO: 380, SEQ ID NO: 382, SEQ ID NO: 384, SEQ ID NO: 386, SEQ ID NO: 388, SEQ ID NO: 390, SEQ ID NO: 392, SEQ ID NO: 394, SEQ ID NO: 396, SEQ ID NO: 398, SEQ ID NO: 400, SEQ ID NO: 402, SEQ ID NO: 404, SEQ ID NO: 406, SEQ ID NO: 408, SEQ ID NO: 410, SEQ ID NO: 412, SEQ ID NO: 414, SEQ ID NO: 416, SEQ ID NO: 418, SEQ ID NO: 420, SEQ ID NO: 422, SEQ ID NO: 424, SEQ ID NO: 426, SEQ ID NO: 428, SEQ ID NO: 430, SEQ ID NO: 432, SEQ ID NO: 434 or SEQ ID NO: 440), the sequences are written one underneath the other for an optimal comparison (for example gaps may be inserted into the sequence of a protein or of a nucleic acid in order to generate an optimal alignment with the other protein or the other nucleic acid). The amino acid residues or nucleic acid molecules at the corresponding amino acid positions or nucleotide positions are then compared. If a position in one sequence is occupied by the same amino acid residue or the same nucleic acid molecule as the corresponding position in the other sequence, the molecules are homologous at this position. (i.e. amino acid or nucleic acid “homology” as used in the present context corresponds to amino acid or nucleic acid “identity”. The percentage homology between the two sequences is a function of the number of identical positions shared by the sequences (i.e. % homology=number of identical positions/total number of positions×100). The terms “homology” and “identity” are thus to be considered as synonyms for this description.

[0295] For the determination of the percentage homology (=identity) of two or more amino acids or of two or more nucleotide sequences several computer software programs have been developed. The homology of two or more sequences can be calculated with for example the software fasta, which presently has been used in the version fasta 3 (W. R. Pearson and D. J. Lipman (1988), Improved Tools for Biological Sequence Comparison. PNAS 85:2444-2448; W. R. Pearson (1990) Rapid and Sensitive Sequence Comparison with FASTP and FASTA, Methods in Enzymology 183:63-98; W. R. Pearson and D. J. Lipman (1988) Improved Tools for Biological Sequence Comparison. PNAS 85:2444-2448; W. R. Pearson (1990); Rapid and Sensitive Sequence Comparison with FASTP and FASTAMethods in Enzymology 183:63-98). Another useful program for the calculation of homologies of different sequences is the standard blast program, which is included in the Biomax pedant software (Biomax, Munich, Federal Republic of Germany). This leads unfortunately sometimes to suboptimal results since blast does not always include complete sequences of the subject and the querry. Nevertheless as this program is very efficient it can be used for the comparison of a huge number of sequences. The following settings are typically used for such a comparisons of sequences:

−p Program Name [String]; −d Database [String]; default=nr; −i Query File [File In]; default=stdin; −e Expectation value (E) [Real]; default=10.0; −m alignment view options: 0=pairwise; 1=query-anchored showing identities; 2=query-anchored no identities; 3=flat query-anchored, show identities; 4=flat query-anchored, no identities; 5=query-anchored no identities and blunt ends; 6=flat query-anchored, no identities and blunt ends; 7=XML Blast output; 8=tabular; 9 tabular with comment lines [Integer]; default=0; −o BLAST report Output File [File Out] Optional; default=stdout; −F Filter query sequence (DUST with blastn, SEG with others) [String]; default=T; −G Cost to open a gap (zero invokes default behavior) [Integer]; default=0; −E Cost to extend a gap (zero invokes default behavior) [Integer]; default=0; −X X dropoff value for gapped alignment (in bits) (zero invokes default behavior); blastn 30, megablast 20, tblastx 0, all others 15 [Integer]; default=0; −I Show GI's in deflines [T/F]; default=F; −q Penalty for a nucleotide mismatch (blastn only) [Integer]; default=−3; −r Reward for a nucleotide match (blastn only) [Integer]; default=1; −v Number of database sequences to show one-line descriptions for (V) [Integer]; default=500; −b Number of database sequence to show alignments for (B) [Integer]; default=250; −f Threshold for extending hits, default if zero; blastp 11, blastn 0, blastx 12, tblastn 13; tblastx 13, megablast 0 [Integer]; default=0; −g Perform gapped alignment (not available with tblastx) [T/F]; default=T; −Q Query Genetic code to use [Integer]; default=1; −D DB Genetic code (for tblast[nx] only) [Integer]; default=1; −a Number of processors to use [Integer]; default=1; −O SeqAlign file [File Out] Optional; −J Believe the query defline [T/F]; default=F; −M Matrix [String]; default=BLOSUM62; −W Word size, default if zero (blastn 11, megablast 28, all others 3) [Integer]; default=0; −z Effective length of the database (use zero for the real size) [Real]; default=0; −K Number of best hits from a region to keep (off by default, if used a value of 100 is recommended) [Integer]; default=0; −P 0 for multiple hit, 1 for single hit [Integer]; default=0; −Y Effective length of the search space (use zero for the real size) [Real]; default=0; −S Query strands to search against database (for blast[nx], and tblastx); 3 is both, 1 is top, 2 is bottom [Integer]; default=3; −T Produce HTML output [T/F]; default=F; −I Restrict search of database to list of GI's [String] Optional; −U Use lower case filtering of FASTA sequence [T/F] Optional; default=F; −y X dropoff value for ungapped extensions in bits (0.0 invokes default behavior); blastn 20, megablast 10, all others 7 [Real]; default=0.0; −Z X dropoff value for final gapped alignment in bits (0.0 invokes default behavior); blastn/megablast 50, tblastx 0, all others 25 [Integer]; default=0; −R PSI-TBLASTN checkpoint file [File In] Optional; −n MegaBlast search [T/F]; default=F; −L Location on query sequence [String] Optional; −A Multiple Hits window size, default if zero (blastn/megablast 0, all others 40 [Integer]; default=0; −w Frame shift penalty (OOF algorithm for blastx) [Integer]; default=0; −t Length of the largest intron allowed in tblastn for linking HSPs (0 disables linking) [Integer]; default=0.

[0296] Results of high quality are reached by using the algorithm of Needleman and Wunsch or Smith and Waterman. Therefore programs based on said algorithms are preferred. Advantageously the comparisons of sequences can be done with the program PileUp (J. Mol. Evolution., 25, 351-360, 1987, Higgins et al., CABIOS, 5 1989: 151-153) or preferably with the programs Gap and BestFit, which are respectively based on the algorithms of Needleman and Wunsch [J. Mol. Biol. 48; 443-453 (1970)] and Smith and Waterman [Adv. Appl. Math. 2; 482-489 (1981)]. Both programs are part of the GCG software-package [Genetics Computer Group, 575 Science Drive, Madison, Wis., USA 53711 (1991); Altschul et al. (1997) Nucleic Acids Res. 25:3389 et seq.]. Therefore preferably the calculations to determine the percentages of sequence homology are done with the program Gap over the whole range of the sequences. The following standard adjustments for the comparison of nucleic acid sequences were used: gap weight: 50, length weight: 3, average match: 10.000, average mismatch: 0.000.

[0297] For example a sequence which has a 80% homology with sequence SEQ ID NO: 1, SEQ ID NO: 7, SEQ ID NO: 19, SEQ ID NO: 65, SEQ ID NO: 152, SEQ ID NO: 229 or SEQ ID NO: 283 at the nucleic acid level is understood as meaning a sequence which, upon comparison with the sequence SEQ ID NO: 1, SEQ ID NO: 7, SEQ ID NO: 19, SEQ ID NO: 65, SEQ ID NO: 152, SEQ ID NO: 229 or SEQ ID NO: 283 by the above Gap program algorithm with the above parameter set, has 80% homology.

[0298] Homology between two polypeptides is understood as meaning the identity of the amino acid sequence over in each case the entire sequence length which is calculated by comparison with the aid of the program algorithm Gap (Wisconsin Package Version 10.0, University of Wisconsin, Genetics Computer Group (GCG), Madison, USA), setting the following parameters: gap weight: 8; length weight: 2; average match: 2.912; average mismatch: −2.003.

[0299] For example a sequence which has a 80% homology with sequence SEQ ID NO: 2, SEQ ID NO: 8, SEQ ID NO: 20, SEQ ID NO: 65, SEQ ID NO: 152, SEQ ID NO: 229 or SEQ ID NO: 283 at the protein level is understood as meaning a sequence which, upon comparison with the sequence SEQ ID NO: 2, SEQ ID NO: 8, SEQ ID NO: 20, SEQ ID NO: 65, SEQ ID NO: 152, SEQ ID NO: 229 or SEQ ID NO: 283 by the above Gap program algorithm with the above parameter set, has 80% homology.

[0300] Functional equivalents derived from one of the polypeptides as shown in SEQ ID NO: 2, SEQ ID NO: 4, SEQ ID NO: 6, SEQ ID NO: 8, SEQ ID NO: 10, SEQ ID NO: 12, SEQ ID NO: 14, SEQ ID NO: 16, SEQ ID NO: 20, SEQ ID NO: 22, SEQ ID NO: 24, SEQ ID NO: 26, SEQ ID NO: 28, SEQ ID NO. 30, SEQ ID NO: 32; SEQ ID NO: 65, SEQ ID NO: 67, SEQ ID NO: 69, SEQ ID NO: 71, SEQ ID NO: 73, SEQ ID NO: 75, SEQ ID NO: 77, SEQ ID NO: 79, SEQ ID NO: 81, SEQ ID NO: 83, SEQ ID NO: 85, SEQ ID NO: 87, SEQ ID NO: 89, SEQ ID NO: 91, SEQ ID NO: 93, SEQ ID NO: 95, SEQ ID NO: 97, SEQ ID NO: 99, SEQ ID NO: 101, SEQ ID NO: 103, SEQ ID NO: 105, SEQ ID NO: 107, SEQ ID NO: 109, SEQ ID NO: 111, SEQ ID NO: 113, SEQ ID NO: 115, SEQ ID NO: 117, SEQ ID NO: 119, SEQ ID NO: 121, SEQ ID NO: 123, SEQ ID NO: 125, SEQ ID NO: 127, SEQ ID NO: 129, SEQ ID NO: 131, SEQ ID NO: 133, SEQ ID NO: 135, SEQ ID NO: 137, SEQ ID NO: 139, SEQ ID NO: 141, SEQ ID NO: 143, SEQ ID NO: 152, SEQ ID NO: 154, SEQ ID NO: 156, SEQ ID NO: 158, SEQ ID NO: 160, SEQ ID NO: 162, SEQ ID NO: 164, SEQ ID NO: 166, SEQ ID NO: 168, SEQ ID NO: 170, SEQ ID NO: 172, SEQ ID NO: 174, SEQ ID NO: 176, SEQ ID NO: 178, SEQ ID NO: 180, SEQ ID NO: 182, SEQ ID NO: 184, SEQ ID NO: 186, SEQ ID NO: 188, SEQ ID NO: 190, SEQ ID NO: 192, SEQ ID NO: 194, SEQ ID NO: 196, SEQ ID NO: 198, SEQ ID NO: 200, SEQ ID NO: 202, SEQ ID NO: 204, SEQ ID NO: 206, SEQ ID NO: 208, SEQ ID NO: 210, SEQ ID NO: 212, SEQ ID NO: 214, SEQ ID NO: 216, SEQ ID NO: 218, SEQ ID NO: 220, SEQ ID NO: 229, SEQ ID NO:231, SEQ ID NO:233, SEQ ID NO: 235, SEQ ID NO: 237, SEQ ID NO: 239, SEQ ID NO: 241, SEQ ID NO: 243, SEQ ID NO: 250, SEQ ID NO: 252, SEQ ID NO: 254, SEQ ID NO: 256, SEQ ID NO: 258, SEQ ID NO: 260, SEQ ID NO: 262, SEQ ID NO: 264, SEQ ID NO: 266, SEQ ID NO: 268, SEQ ID NO: 270, SEQ ID NO: 272, SEQ ID NO: 283, SEQ ID NO: 285, SEQ ID NO: 287, SEQ ID NO: 289, SEQ ID NO: 291, SEQ ID NO: 293, SEQ ID NO: 295, SEQ ID NO: 297, SEQ ID NO: 299, SEQ ID NO: 301, SEQ ID NO: 303, SEQ ID NO: 305, SEQ ID NO: 307, SEQ ID NO: 309, SEQ ID NO: 311, SEQ ID NO: 313, SEQ ID NO: 315, SEQ ID NO: 317, SEQ ID NO: 319, SEQ ID NO: 321, SEQ ID NO: 323, SEQ ID NO: 325, SEQ ID NO: 327, SEQ ID NO: 329, SEQ ID NO: 331, SEQ ID NO: 333, SEQ ID NO: 335, SEQ ID NO: 337, SEQ ID NO: 339, SEQ ID NO: 341, SEQ ID NO: 343, SEQ ID NO: 345, SEQ ID NO: 347, SEQ ID NO: 349, SEQ ID NO: 351, SEQ ID NO: 353, SEQ ID NO: 355, SEQ ID NO: 357, SEQ ID NO: 359, SEQ ID NO: 361, SEQ ID NO: 363, SEQ ID NO: 365, SEQ ID NO: 367, SEQ ID NO: 369, SEQ ID NO: 371, SEQ ID NO: 373, SEQ ID NO: 375, SEQ ID NO: 377, SEQ ID NO: 379, SEQ ID NO: 381, SEQ ID NO: 383, SEQ ID NO: 385, SEQ ID NO: 387, SEQ ID NO: 389, SEQ ID NO: 391, SEQ ID NO: 393, SEQ ID NO: 395, SEQ ID NO: 397, SEQ ID NO: 399, SEQ ID NO: 401, SEQ ID NO: 403, SEQ ID NO: 405, SEQ ID NO: 407, SEQ ID NO: 409, SEQ ID NO: 411, SEQ ID NO: 413, SEQ ID NO: 415, SEQ ID NO: 417, SEQ ID NO: 419, SEQ ID NO: 421, SEQ ID NO: 423, SEQ ID NO: 425, SEQ ID NO: 427, SEQ ID NO: 429, SEQ ID NO: 431, SEQ ID NO: 433, SEQ ID NO: 435 or SEQ ID NO: 441 according to the invention by substitution, insertion or deletion have at least 30%, 35%, 40%, 45% or 50%, preferably at least 55%, 60%, 65% or 70% by preference at least 80%, especially preferably at least 85% or 90%, 91%, 92%, 93% or 94%, very especially preferably at least 95%, 97%, 98% or 99% homology with one of the polypeptides as shown in SEQ ID NO: 2, SEQ ID NO: 4, SEQ ID NO: 6, SEQ ID NO: 8, SEQ ID NO: 10, SEQ ID NO: 12, SEQ ID NO: 14, SEQ ID NO: 16, SEQ ID NO: 20, SEQ ID NO: 22, SEQ ID NO: 24, SEQ ID NO: 26, SEQ ID NO: 28, SEQ ID NO. 30, SEQ ID NO: 32; SEQ ID NO: 65, SEQ ID NO: 67, SEQ ID NO: 69, SEQ ID NO: 71, SEQ ID NO: 73, SEQ ID NO: 75, SEQ ID NO: 77, SEQ ID NO: 79, SEQ ID NO: 81, SEQ ID NO: 83, SEQ ID NO: 85, SEQ ID NO: 87, SEQ ID NO: 89, SEQ ID NO: 91, SEQ ID NO: 93, SEQ ID NO: 95, SEQ ID NO: 97, SEQ ID NO: 99, SEQ ID NO: 101, SEQ ID NO: 103, SEQ ID NO: 105, SEQ ID NO: 107, SEQ ID NO: 109, SEQ ID NO: 111, SEQ ID NO: 113, SEQ ID NO: 115, SEQ ID NO: 117, SEQ ID NO: 119, SEQ ID NO: 121, SEQ ID NO: 123, SEQ ID NO: 125, SEQ ID NO: 127, SEQ ID NO: 129, SEQ ID NO: 131, SEQ ID NO: 133, SEQ ID NO: 135, SEQ ID NO: 137, SEQ ID NO: 139, SEQ ID NO: 141, SEQ ID NO: 143, SEQ ID NO: 152, SEQ ID NO: 154, SEQ ID NO: 156, SEQ ID NO: 158, SEQ ID NO: 160, SEQ ID NO: 162, SEQ ID NO: 164, SEQ ID NO: 166, SEQ ID NO: 168, SEQ ID NO: 170, SEQ ID NO: 172, SEQ ID NO: 174, SEQ ID NO: 176, SEQ ID NO: 178, SEQ ID NO: 180, SEQ ID NO: 182, SEQ ID NO: 184, SEQ ID NO: 186, SEQ ID NO: 188, SEQ ID NO: 190, SEQ ID NO: 192, SEQ ID NO: 194, SEQ ID NO: 196, SEQ ID NO: 198, SEQ ID NO: 200, SEQ ID NO: 202, SEQ ID NO: 204, SEQ ID NO: 206, SEQ ID NO: 208, SEQ ID NO: 210, SEQ ID NO: 212, SEQ ID NO: 214, SEQ ID NO: 216, SEQ ID NO: 218, SEQ ID NO: 220, SEQ ID NO: 229, SEQ ID NO:231, SEQ ID NO:233, SEQ ID NO: 235, SEQ ID NO: 237, SEQ ID NO: 239, SEQ ID NO: 241, SEQ ID NO: 243, SEQ ID NO: 250, SEQ ID NO: 252, SEQ ID NO: 254, SEQ ID NO: 256, SEQ ID NO: 258, SEQ ID NO: 260, SEQ ID NO: 262, SEQ ID NO: 264, SEQ ID NO: 266, SEQ ID NO: 268, SEQ ID NO: 270, SEQ ID NO: 272, SEQ ID NO: 283, SEQ ID NO: 285, SEQ ID NO: 287, SEQ ID NO: 289, SEQ ID NO: 291, SEQ ID NO: 293, SEQ ID NO: 295, SEQ ID NO: 297, SEQ ID NO: 299, SEQ ID NO: 301, SEQ ID NO: 303, SEQ ID NO: 305, SEQ ID NO: 307, SEQ ID NO: 309, SEQ ID NO: 311, SEQ ID NO: 313, SEQ ID NO: 315, SEQ ID NO: 317, SEQ ID NO: 319, SEQ ID NO: 321, SEQ ID NO: 323, SEQ ID NO: 325, SEQ ID NO: 327, SEQ ID NO: 329, SEQ ID NO: 331, SEQ ID NO: 333, SEQ ID NO: 335, SEQ ID NO: 337, SEQ ID NO: 339, SEQ ID NO: 341, SEQ ID NO: 343, SEQ ID NO: 345, SEQ ID NO: 347, SEQ ID NO: 349, SEQ ID NO: 351, SEQ ID NO: 353, SEQ ID NO: 355, SEQ ID NO: 357, SEQ ID NO: 359, SEQ ID NO: 361, SEQ ID NO: 363, SEQ ID NO: 365, SEQ ID NO: 367, SEQ ID NO: 369, SEQ ID NO: 371, SEQ ID NO: 373, SEQ ID NO: 375, SEQ ID NO: 377, SEQ ID NO: 379, SEQ ID NO: 381, SEQ ID NO: 383, SEQ ID NO: 385, SEQ ID NO: 387, SEQ ID NO: 389, SEQ ID NO: 391, SEQ ID NO: 393, SEQ ID NO: 395, SEQ ID NO: 397, SEQ ID NO: 399, SEQ ID NO: 401, SEQ ID NO: 403, SEQ ID NO: 405, SEQ ID NO: 407, SEQ ID NO: 409, SEQ ID NO: 411, SEQ ID NO: 413, SEQ ID NO: 415, SEQ ID NO: 417, SEQ ID NO: 419, SEQ ID NO: 421, SEQ ID NO: 423, SEQ ID NO: 425, SEQ ID NO: 427, SEQ ID NO: 429, SEQ ID NO: 431, SEQ ID NO: 433, SEQ ID NO: 435 or SEQ ID NO: 441 according to the invention and are distinguished by essentially the same properties as the polypeptide as shown in SEQ ID NO: 2, SEQ ID NO: 4, SEQ ID NO: 6, SEQ ID NO: 8, SEQ ID NO: 10, SEQ ID NO: 12, SEQ ID NO: 14, SEQ ID NO: 16, SEQ ID NO: 20, SEQ ID NO: 22, SEQ ID NO: 24, SEQ ID NO: 26, SEQ ID NO: 28, SEQ ID NO. 30, SEQ ID NO: 32; SEQ ID NO: 65, SEQ ID NO: 67, SEQ ID NO: 69, SEQ ID NO: 71, SEQ ID NO: 73, SEQ ID NO: 75, SEQ ID NO: 77, SEQ ID NO: 79, SEQ ID NO: 81, SEQ ID NO: 83, SEQ ID NO: 85, SEQ ID NO: 87, SEQ ID NO: 89, SEQ ID NO: 91, SEQ ID NO: 93, SEQ ID NO: 95, SEQ ID NO: 97, SEQ ID NO: 99, SEQ ID NO: 101, SEQ ID NO: 103, SEQ ID NO: 105, SEQ ID NO: 107, SEQ ID NO: 109, SEQ ID NO: 111, SEQ ID NO: 113, SEQ ID NO: 115, SEQ ID NO: 117, SEQ ID NO: 119, SEQ ID NO: 121, SEQ ID NO: 123, SEQ ID NO: 125, SEQ ID NO: 127, SEQ ID NO: 129, SEQ ID NO: 131, SEQ ID NO: 133, SEQ ID NO: 135, SEQ ID NO: 137, SEQ ID NO: 139, SEQ ID NO: 141, SEQ ID NO: 143, SEQ ID NO: 152, SEQ ID NO: 154, SEQ ID NO: 156, SEQ ID NO: 158, SEQ ID NO: 160, SEQ ID NO: 162, SEQ ID NO: 164, SEQ ID NO: 166, SEQ ID NO: 168, SEQ ID NO: 170, SEQ ID NO: 172, SEQ ID NO: 174, SEQ ID NO: 176, SEQ ID NO: 178, SEQ ID NO: 180, SEQ ID NO: 182, SEQ ID NO: 184, SEQ ID NO: 186, SEQ ID NO: 188, SEQ ID NO: 190, SEQ ID NO: 192, SEQ ID NO: 194, SEQ ID NO: 196, SEQ ID NO: 198, SEQ ID NO: 200, SEQ ID NO: 202, SEQ ID NO: 204, SEQ ID NO: 206, SEQ ID NO: 208, SEQ ID NO: 210, SEQ ID NO: 212, SEQ ID NO: 214, SEQ ID NO: 216, SEQ ID NO: 218, SEQ ID NO: 220, SEQ ID NO: 229, SEQ ID NO:231, SEQ ID NO:233, SEQ ID NO: 235, SEQ ID NO: 237, SEQ ID NO: 239, SEQ ID NO: 241, SEQ ID NO: 243, SEQ ID NO: 250, SEQ ID NO: 252, SEQ ID NO: 254, SEQ ID NO: 256, SEQ ID NO: 258, SEQ ID NO: 260, SEQ ID NO: 262, SEQ ID NO: 264, SEQ ID NO: 266, SEQ ID NO: 268, SEQ ID NO: 270, SEQ ID NO: 272, SEQ ID NO: 283, SEQ ID NO: 285, SEQ ID NO: 287, SEQ ID NO: 289, SEQ ID NO: 291, SEQ ID NO: 293, SEQ ID NO: 295, SEQ ID NO: 297, SEQ ID NO: 299, SEQ ID NO: 301, SEQ ID NO: 303, SEQ ID NO: 305, SEQ ID NO: 307, SEQ ID NO: 309, SEQ ID NO: 311, SEQ ID NO: 313, SEQ ID NO: 315, SEQ ID NO: 317, SEQ ID NO: 319, SEQ ID NO: 321, SEQ ID NO: 323, SEQ ID NO: 325, SEQ ID NO: 327, SEQ ID NO: 329, SEQ ID NO: 331, SEQ ID NO: 333, SEQ ID NO: 335, SEQ ID NO: 337, SEQ ID NO: 339, SEQ ID NO: 341, SEQ ID NO: 343, SEQ ID NO: 345, SEQ ID NO: 347, SEQ ID NO: 349, SEQ ID NO: 351, SEQ ID NO: 353, SEQ ID NO: 355, SEQ ID NO: 357, SEQ ID NO: 359, SEQ ID NO: 361, SEQ ID NO: 363, SEQ ID NO: 365, SEQ ID NO: 367, SEQ ID NO: 369, SEQ ID NO: 371, SEQ ID NO: 373, SEQ ID NO: 375, SEQ ID NO: 377, SEQ ID NO: 379, SEQ ID NO: 381, SEQ ID NO: 383, SEQ ID NO: 385, SEQ ID NO: 387, SEQ ID NO: 389, SEQ ID NO: 391, SEQ ID NO: 393, SEQ ID NO: 395, SEQ ID NO: 397, SEQ ID NO: 399, SEQ ID NO: 401, SEQ ID NO: 403, SEQ ID NO: 405, SEQ ID NO: 407, SEQ ID NO: 409, SEQ ID NO: 411, SEQ ID NO: 413, SEQ ID NO: 415, SEQ ID NO: 417, SEQ ID NO: 419, SEQ ID NO: 421, SEQ ID NO: 423, SEQ ID NO: 425, SEQ ID NO: 427, SEQ ID NO: 429, SEQ ID NO: 431, SEQ ID NO: 433, SEQ ID NO: 435 or SEQ ID NO: 441 preferably of the polypeptides of S. cerevisiae, E. coli or A. thaliana.

[0301] Functional equivalents derived from the nucleic acid sequence as shown in SEQ ID NO: 1, SEQ ID NO: 3, SEQ ID NO: 5, SEQ ID NO: 7, SEQ ID NO: 9, SEQ ID NO: 11, SEQ ID NO: 13, SEQ ID NO: 15, SEQ ID NO: 19, SEQ ID NO: 21, SEQ ID NO: 23, SEQ ID NO: 25, SEQ ID NO: 27, SEQ ID NO: 29, SEQ ID NO: 31; SEQ ID NO: 64, SEQ ID NO: 66, SEQ ID NO: 68, SEQ ID NO: 70, SEQ ID NO: 72, SEQ ID NO: 74, SEQ ID NO: 76, SEQ ID NO: 78, SEQ ID NO: 80, SEQ ID NO: 82, SEQ ID NO: 84, SEQ ID NO: 86, SEQ ID NO: 88, SEQ ID NO: 90, SEQ ID NO: 92, SEQ ID NO: 94, SEQ ID NO: 96, SEQ ID NO: 98, SEQ ID NO: 100, SEQ ID NO: 102, SEQ ID NO: 104, SEQ ID NO: 106, SEQ ID NO: 108, SEQ ID NO: 110, SEQ ID NO: 112, SEQ ID NO: 114, SEQ ID NO: 116, SEQ ID NO: 118, SEQ ID NO: 120, SEQ ID NO: 122, SEQ ID NO: 124, SEQ ID NO: 126, SEQ ID NO: 128, SEQ ID NO: 130, SEQ ID NO: 132, SEQ ID NO: 134, SEQ ID NO: 136, SEQ ID NO: 138, SEQ ID NO: 140, SEQ ID NO: , SEQ ID NO: 142, SEQ ID NO: 151, SEQ ID NO: 153, SEQ ID NO: 155, SEQ ID NO: 157, SEQ ID NO: 159, SEQ ID NO: 161, SEQ ID NO: 163, SEQ ID NO: 165, SEQ ID NO: 167, SEQ ID NO: 169, SEQ ID NO: 171, SEQ ID NO: 173, SEQ ID NO: 175, SEQ ID NO: 177, SEQ ID NO: 179, SEQ ID NO: 181, SEQ ID NO: 183, SEQ ID NO: 185, SEQ ID NO: 187, SEQ ID NO: 189, SEQ ID NO: 191, SEQ ID NO: 193, SEQ ID NO: 195, SEQ ID NO: 197, SEQ ID NO: 199, SEQ ID NO: 201, SEQ ID NO: 203, SEQ ID NO: 205, SEQ ID NO: 207, SEQ ID NO: 209, SEQ ID NO: 211, SEQ ID NO: 213, SEQ ID NO: 215, SEQ ID NO: 217, SEQ ID NO: 219, SEQ ID NO: 228, SEQ ID NO: 230, SEQ ID NO: 232, SEQ ID NO: 234, SEQ ID NO: 236, SEQ ID NO: 238, SEQ ID NO: 240, SEQ ID NO: 242, SEQ ID NO: 249, SEQ ID NO: 251, SEQ ID NO: 253, SEQ ID NO: 255, SEQ ID NO: 257, SEQ ID NO: 259, SEQ ID NO: 261, SEQ ID NO: 263, SEQ ID NO: 265, SEQ ID NO: 267, SEQ ID NO: 269, SEQ ID NO: 271, SEQ ID NO: 282, SEQ ID NO: 284, SEQ ID NO: 286, SEQ ID NO: 288, SEQ ID NO: 290, SEQ ID NO: 292, SEQ ID NO: 294, SEQ ID NO: 296, SEQ ID NO: 298, SEQ ID NO: 300, SEQ ID NO: 302, SEQ ID NO: 304, SEQ ID NO: 306, SEQ ID NO: 308, SEQ ID NO: 310, SEQ ID NO: 312, SEQ ID NO: 314, SEQ ID NO: 316, SEQ ID NO: 318, SEQ ID NO: 320, SEQ ID NO: 322, SEQ ID NO: 324, SEQ ID NO: 326, SEQ ID NO: 328, SEQ ID NO: 330, SEQ ID NO: 332, SEQ ID NO: 334, SEQ ID NO: 336, SEQ ID NO: 338, SEQ ID NO: 340, SEQ ID NO: 342, SEQ ID NO: 344, SEQ ID NO: 346, SEQ ID NO: 348, SEQ ID NO: 350, SEQ ID NO: 352, SEQ ID NO: 354, SEQ ID NO: 356, SEQ ID NO: 358, SEQ ID NO: 360, SEQ ID NO: 362, SEQ ID NO: 364, SEQ ID NO: 366, SEQ ID NO: 368, SEQ ID NO: 370, SEQ ID NO: 372, SEQ ID NO: 374, SEQ ID NO: 376, SEQ ID NO: 378, SEQ ID NO: 380, SEQ ID NO: 382, SEQ ID NO: 384, SEQ ID NO: 386, SEQ ID NO: 388, SEQ ID NO: 390, SEQ ID NO: 392, SEQ ID NO: 394, SEQ ID NO: 396, SEQ ID NO: 398, SEQ ID NO: 400, SEQ ID NO: 402, SEQ ID NO: 404, SEQ ID NO: 406, SEQ ID NO: 408, SEQ ID NO: 410, SEQ ID NO: 412, SEQ ID NO: 414, SEQ ID NO: 416, SEQ ID NO: 418, SEQ ID NO: 420, SEQ ID NO: 422, SEQ ID NO: 424, SEQ ID NO: 426, SEQ ID NO: 428, SEQ ID NO: 430, SEQ ID NO: 432, SEQ ID NO: 434 or SEQ ID NO: 440 according to the invention by substitution, insertion or deletion have at least 30%, 35%, 40%, 45% or 50%, preferably at least 55%, 60%, 65% or 70% by preference at least 80%, especially preferably at least 85% or 90%, 91%, 92%, 93% or 94%, very especially preferably at least 95%, 97%, 98% or 99% homology with one of the polypeptides as shown in SEQ ID NO: 2, SEQ ID NO: 4, SEQ ID NO: 6, SEQ ID NO: 8, SEQ ID NO: 10, SEQ ID NO: 12, SEQ ID NO: 14, SEQ ID NO: 16, SEQ ID NO: 20, SEQ ID NO: 22, SEQ ID NO: 24, SEQ ID NO: 26, SEQ ID NO: 28, SEQ ID NO. 30, SEQ ID NO: 32; SEQ ID NO: 65, SEQ ID NO: 67, SEQ ID NO: 69, SEQ ID NO: 71, SEQ ID NO: 73, SEQ ID NO: 75, SEQ ID NO: 77, SEQ ID NO: 79, SEQ ID NO: 81, SEQ ID NO: 83, SEQ ID NO: 85, SEQ ID NO: 87, SEQ ID NO: 89, SEQ ID NO: 91, SEQ ID NO: 93, SEQ ID NO: 95, SEQ ID NO: 97, SEQ ID NO: 99, SEQ ID NO: 101, SEQ ID NO: 103, SEQ ID NO: 105, SEQ ID NO: 107, SEQ ID NO: 109, SEQ ID NO: 111, SEQ ID NO: 113, SEQ ID NO: 115, SEQ ID NO: 117, SEQ ID NO: 119, SEQ ID NO: 121, SEQ ID NO: 123, SEQ ID NO: 125, SEQ ID NO: 127, SEQ ID NO: 129, SEQ ID NO: 131, SEQ ID NO: 133, SEQ ID NO: 135, SEQ ID NO: 137, SEQ ID NO: 139, SEQ ID NO: 141, SEQ ID NO: 143, SEQ ID NO: 152, SEQ ID NO: 154, SEQ ID NO: 156, SEQ ID NO: 158, SEQ ID NO: 160, SEQ ID NO: 162, SEQ ID NO: 164, SEQ ID NO: 166, SEQ ID NO: 168, SEQ ID NO: 170, SEQ ID NO: 172, SEQ ID NO: 174, SEQ ID NO: 176, SEQ ID NO: 178, SEQ ID NO: 180, SEQ ID NO: 182, SEQ ID NO: 184, SEQ ID NO: 186, SEQ ID NO: 188, SEQ ID NO: 190, SEQ ID NO: 192, SEQ ID NO: 194, SEQ ID NO: 196, SEQ ID NO: 198, SEQ ID NO: 200, SEQ ID NO: 202, SEQ ID NO: 204, SEQ ID NO: 206, SEQ ID NO: 208, SEQ ID NO: 210, SEQ ID NO: 212, SEQ ID NO: 214, SEQ ID NO: 216, SEQ ID NO: 218, SEQ ID NO: 220, SEQ ID NO: 229, SEQ ID NO:231, SEQ ID NO:233, SEQ ID NO: 235, SEQ ID NO: 237, SEQ ID NO: 239, SEQ ID NO: 241, SEQ ID NO: 243, SEQ ID NO: 250, SEQ ID NO: 252, SEQ ID NO: 254, SEQ ID NO: 256, SEQ ID NO: 258, SEQ ID NO: 260, SEQ ID NO: 262, SEQ ID NO: 264, SEQ ID NO: 266, SEQ ID NO: 268, SEQ ID NO: 270, SEQ ID NO: 272, SEQ ID NO: 283, SEQ ID NO: 285, SEQ ID NO: 297, SEQ ID NO: 289, SEQ ID NO: 291, SEQ ID NO: 293, SEQ ID NO: 295, SEQ ID NO: 297, SEQ ID NO: 299, SEQ ID NO: 301, SEQ ID NO: 303, SEQ ID NO: 305, SEQ ID NO: 307, SEQ ID NO: 309, SEQ ID NO: 311, SEQ ID NO: 313, SEQ ID NO: 315, SEQ ID NO: 317, SEQ ID NO: 319, SEQ ID NO: 321, SEQ ID NO: 323, SEQ ID NO: 325, SEQ ID NO: 327, SEQ ID NO: 329, SEQ ID NO: 331, SEQ ID NO: 333, SEQ ID NO: 335, SEQ ID NO: 337, SEQ ID NO: 339, SEQ ID NO: 341, SEQ ID NO: 343, SEQ ID NO: 345, SEQ ID NO: 347, SEQ ID NO: 349, SEQ ID NO: 351, SEQ ID NO: 353, SEQ ID NO: 355, SEQ ID NO: 357, SEQ ID NO: 359, SEQ ID NO: 361, SEQ ID NO: 363, SEQ ID NO: 365, SEQ ID NO: 367, SEQ ID NO: 369, SEQ ID NO: 371, SEQ ID NO: 373, SEQ ID NO: 375, SEQ ID NO: 377, SEQ ID NO: 379, SEQ ID NO: 381, SEQ ID NO: 383, SEQ ID NO: 385, SEQ ID NO: 387, SEQ ID NO: 389, SEQ ID NO: 391, SEQ ID NO: 393, SEQ ID NO: 395, SEQ ID NO: 397, SEQ ID NO: 399, SEQ ID NO: 401, SEQ ID NO: 403, SEQ ID NO: 405, SEQ ID NO: 407, SEQ ID NO: 409, SEQ ID NO: 411, SEQ ID NO: 413, SEQ ID NO: 415, SEQ ID NO: 417, SEQ ID NO: 419, SEQ ID NO: 421, SEQ ID NO: 423, SEQ ID NO: 425, SEQ ID NO: 427, SEQ ID NO: 429, SEQ ID NO: 431, SEQ ID NO: 433, SEQ ID NO: 435 or SEQ ID NO: 441 according to the invention and encode polypeptides having essentially the same properties as the polypeptide as shown in SEQ ID NO: 2, SEQ ID NO: 4, SEQ ID NO: 6, SEQ ID NO: 8, SEQ ID NO: 10, SEQ ID NO: 12, SEQ ID NO: 14, SEQ ID NO: 16, SEQ ID NO: 20, SEQ ID NO: 22, SEQ ID NO: 24, SEQ ID NO: 26, SEQ ID NO: 28, SEQ ID NO. 30, SEQ ID NO: 32; SEQ ID NO: 65, SEQ ID NO: 67, SEQ ID NO: 69, SEQ ID NO: 71, SEQ ID NO: 73, SEQ ID NO: 75, SEQ ID NO: 77, SEQ ID NO: 79, SEQ ID NO: 81, SEQ ID NO: 83, SEQ ID NO: 85, SEQ ID NO: 87, SEQ ID NO: 89, SEQ ID NO: 91, SEQ ID NO: 93, SEQ ID NO: 95, SEQ ID NO: 97, SEQ ID NO: 99, SEQ ID NO: 101, SEQ ID NO: 103, SEQ ID NO: 105, SEQ ID NO: 107, SEQ ID NO: 109, SEQ ID NO: 111, SEQ ID NO: 113, SEQ ID NO: 115, SEQ ID NO: 117, SEQ ID NO: 119, SEQ ID NO: 121, SEQ ID NO: 123, SEQ ID NO: 125, SEQ ID NO: 127, SEQ ID NO: 129, SEQ ID NO: 131, SEQ ID NO: 133, SEQ ID NO: 135, SEQ ID NO: 137, SEQ ID NO: 139, SEQ ID NO: 141, SEQ ID NO: 143, SEQ ID NO: 152, SEQ ID NO: 154, SEQ ID NO: 156, SEQ ID NO: 158, SEQ ID NO: 160, SEQ ID NO: 162, SEQ ID NO: 164, SEQ ID NO: 166, SEQ ID NO: 168, SEQ ID NO: 170, SEQ ID NO: 172, SEQ ID NO: 174, SEQ ID NO: 176, SEQ ID NO: 178, SEQ ID NO: 180, SEQ ID NO: 182, SEQ ID NO: 184, SEQ ID NO: 186, SEQ ID NO: 188, SEQ ID NO: 190, SEQ ID NO: 192, SEQ ID NO: 194, SEQ ID NO: 196, SEQ ID NO: 198, SEQ ID NO: 200, SEQ ID NO: 202, SEQ ID NO: 204, SEQ ID NO: 206, SEQ ID NO: 208, SEQ ID NO: 210, SEQ ID NO: 212, SEQ ID NO: 214, SEQ ID NO: 216, SEQ ID NO: 218, SEQ ID NO: 220, SEQ ID NO: 229, SEQ ID NO:231, SEQ ID NO:233, SEQ ID NO: 235, SEQ ID NO: 237, SEQ ID NO: 239, SEQ ID NO: 241, SEQ ID NO: 243, SEQ ID NO: 250, SEQ ID NO: 252, SEQ ID NO: 254, SEQ ID NO: 256, SEQ ID NO: 258, SEQ ID NO: 260, SEQ ID NO: 262, SEQ ID NO: 264, SEQ ID NO: 266, SEQ ID NO: 268, SEQ ID NO: 270, SEQ ID NO: 272, SEQ ID NO: 283, SEQ ID NO: 285, SEQ ID NO: 287, SEQ ID NO: 289, SEQ ID NO: 291, SEQ ID NO: 293, SEQ ID NO: 295, SEQ ID NO: 297, SEQ ID NO: 299, SEQ ID NO: 301, SEQ ID NO: 303, SEQ ID NO: 305, SEQ ID NO: 307, SEQ ID NO: 309, SEQ ID NO: 311, SEQ ID NO: 313, SEQ ID NO: 315, SEQ ID NO: 317, SEQ ID NO: 319, SEQ ID NO: 321, SEQ ID NO: 323, SEQ ID NO: 325, SEQ ID NO: 327, SEQ ID NO: 329, SEQ ID NO: 331, SEQ ID NO: 333, SEQ ID NO: 335, SEQ ID NO: 337, SEQ ID NO: 339, SEQ ID NO: 341, SEQ ID NO: 343, SEQ ID NO: 345, SEQ ID NO: 347, SEQ ID NO: 349, SEQ ID NO: 351, SEQ ID NO: 353, SEQ ID NO: 355, SEQ ID NO: 357, SEQ ID NO: 359, SEQ ID NO: 361, SEQ ID NO: 363, SEQ ID NO: 365, SEQ ID NO: 367, SEQ ID NO: 369, SEQ ID NO: 371, SEQ ID NO: 373, SEQ ID NO: 375, SEQ ID NO: 377, SEQ ID NO: 379, SEQ ID NO: 381, SEQ ID NO: 383, SEQ ID NO: 385, SEQ ID NO: 387, SEQ ID NO: 389, SEQ ID NO: 391, SEQ ID NO: 393, SEQ ID NO: 395, SEQ ID NO: 397, SEQ ID NO: 399, SEQ ID NO: 401, SEQ ID NO: 403, SEQ ID NO: 405, SEQ ID NO: 407, SEQ ID NO: 409, SEQ ID NO: 411, SEQ ID NO: 413, SEQ ID NO: 415, SEQ ID NO: 417, SEQ ID NO: 419, SEQ ID NO: 421, SEQ ID NO: 423, SEQ ID NO: 425, SEQ ID NO: 427, SEQ ID NO: 429, SEQ ID NO: 431, SEQ ID NO: 433, SEQ ID NO: 435 or SEQ ID NO: 441.

[0302] “Essentially the same properties” of a functional equivalent is above all understood as meaning that the functional equivalent has above mentioned activity, e.g conferring an increasing in the fine chemical amount while decreasing the amount of protein, activity or function of said functional equivalent in an organism, e.g. a microorganism, a plant or in a plant or animal tissue, plant or animal cells or a part of the same.

[0303] A nucleic acid molecule encoding an homologous to a protein sequence of SEQ ID NO: 2, SEQ ID NO: 4, SEQ ID NO: 6, SEQ ID NO: 8, SEQ ID NO: 10, SEQ ID NO: 12, SEQ ID NO: 14, SEQ ID NO: 16, SEQ ID NO: 20, SEQ ID NO: 22, SEQ ID NO: 24, SEQ ID NO: 26, SEQ ID NO: 28, SEQ ID NO. 30, SEQ ID NO: 32; SEQ ID NO: 65, SEQ ID NO: 67, SEQ ID NO: 69, SEQ ID NO: 71, SEQ ID NO: 73, SEQ ID NO: 75, SEQ ID NO: 77, SEQ ID NO: 79, SEQ ID NO: 81, SEQ ID NO: 83, SEQ ID NO: 85, SEQ ID NO: 87, SEQ ID NO: 89, SEQ ID NO: 91, SEQ ID NO: 93, SEQ ID NO: 95, SEQ ID NO: 97, SEQ ID NO: 99, SEQ ID NO: 101, SEQ ID NO: 103, SEQ ID NO: 105, SEQ ID NO: 107, SEQ ID NO: 109, SEQ ID NO: 111, SEQ ID NO: 113, SEQ ID NO: 115, SEQ ID NO: 117, SEQ ID NO: 119, SEQ ID NO: 121, SEQ ID NO: 123, SEQ ID NO: 125, SEQ ID NO: 127, SEQ ID NO: 129, SEQ ID NO: 131, SEQ ID NO: 133, SEQ ID NO: 135, SEQ ID NO: 137, SEQ ID NO: 139, SEQ ID NO: 141, SEQ ID NO: 143, SEQ ID NO: 152, SEQ ID NO: 154, SEQ ID NO: 156, SEQ ID NO: 158, SEQ ID NO: 160, SEQ ID NO: 162, SEQ ID NO: 164, SEQ ID NO: 166, SEQ ID NO: 168, SEQ ID NO: 170, SEQ ID NO: 172, SEQ ID NO: 174, SEQ ID NO: 176, SEQ ID NO: 178, SEQ ID NO: 180, SEQ ID NO: 182, SEQ ID NO: 184, SEQ ID NO: 186, SEQ ID NO: 188, SEQ ID NO: 190, SEQ ID NO: 192, SEQ ID NO: 194, SEQ ID NO: 196, SEQ ID NO: 198, SEQ ID NO: 200, SEQ ID NO: 202, SEQ ID NO: 204, SEQ ID NO: 206, SEQ ID NO: 208, SEQ ID NO: 210, SEQ ID NO: 212, SEQ ID NO: 214, SEQ ID NO: 216, SEQ ID NO: 218, SEQ ID NO: 220, SEQ ID NO: 229, SEQ ID NO:231, SEQ ID NO:233, SEQ ID NO: 235, SEQ ID NO: 237, SEQ ID NO: 239, SEQ ID NO: 241, SEQ ID NO: 243, SEQ ID NO: 250, SEQ ID NO: 252, SEQ ID NO: 254, SEQ ID NO: 256, SEQ ID NO: 258, SEQ ID NO: 260, SEQ ID NO: 262, SEQ ID NO: 264, SEQ ID NO: 266, SEQ ID NO: 268, SEQ ID NO: 270, SEQ ID NO: 272, SEQ ID NO: 283, SEQ ID NO: 285, SEQ ID NO: 287, SEQ ID NO: 289, SEQ ID NO: 291, SEQ ID NO: 293, SEQ ID NO: 295, SEQ ID NO: 297, SEQ ID NO: 299, SEQ ID NO: 301, SEQ ID NO: 303, SEQ ID NO: 305, SEQ ID NO: 307, SEQ ID NO: 309, SEQ ID NO: 311, SEQ ID NO: 313, SEQ ID NO: 315, SEQ ID NO: 317, SEQ ID NO: 319, SEQ ID NO: 321, SEQ ID NO: 323, SEQ ID NO: 325, SEQ ID NO: 327, SEQ ID NO: 329, SEQ ID NO: 331, SEQ ID NO: 333, SEQ ID NO: 335, SEQ ID NO: 337, SEQ ID NO: 339, SEQ ID NO: 341, SEQ ID NO: 343, SEQ ID NO: 345, SEQ ID NO: 347, SEQ ID NO: 349, SEQ ID NO: 351, SEQ ID NO: 353, SEQ ID NO: 355, SEQ ID NO: 357, SEQ ID NO: 359, SEQ ID NO: 361, SEQ ID NO: 363, SEQ ID NO: 365, SEQ ID NO: 367, SEQ ID NO: 369, SEQ ID NO: 371, SEQ ID NO: 373, SEQ ID NO: 375, SEQ ID NO: 377, SEQ ID NO: 379, SEQ ID NO: 381, SEQ ID NO: 383, SEQ ID NO: 385, SEQ ID NO: 387, SEQ ID NO: 389, SEQ ID NO: 391, SEQ ID NO: 393, SEQ ID NO: 395, SEQ ID NO: 397, SEQ ID NO: 399, SEQ ID NO: 401, SEQ ID NO: 403, SEQ ID NO: 405, SEQ ID NO: 407, SEQ ID NO: 409, SEQ ID NO: 411, SEQ ID NO: 413, SEQ ID NO: 415, SEQ ID NO: 417, SEQ ID NO: 419, SEQ ID NO: 421, SEQ ID NO: 423, SEQ ID NO: 425, SEQ ID NO: 427, SEQ ID NO: 429, SEQ ID NO: 431, SEQ ID NO: 433, SEQ ID NO: 435 or SEQ ID NO: 441 can be created by introducing one or more nucleotide substitutions, additions or deletions into a nucleotide sequence of the nucleic acid molecule of the present invention, in particular of SEQ ID NO: 2, SEQ ID NO: 4, SEQ ID NO: 6, SEQ ID NO: 8, SEQ ID NO: 10, SEQ ID NO: 12, SEQ ID NO: 14, SEQ ID NO: 16, SEQ ID NO: 20, SEQ ID NO: 22, SEQ ID NO: 24, SEQ ID NO: 26, SEQ ID NO: 28, SEQ ID NO. 30, SEQ ID NO: 32; SEQ ID NO: 65, SEQ ID NO: 67, SEQ ID NO: 69, SEQ ID NO: 71, SEQ ID NO: 73, SEQ ID NO: 75, SEQ ID NO: 77, SEQ ID NO: 79, SEQ ID NO: 81, SEQ ID NO: 83, SEQ ID NO: 85, SEQ ID NO: 87, SEQ ID NO: 89, SEQ ID NO: 91, SEQ ID NO: 93, SEQ ID NO: 95, SEQ ID NO: 97, SEQ ID NO: 99, SEQ ID NO: 101, SEQ ID NO: 103, SEQ ID NO: 105, SEQ ID NO: 107, SEQ ID NO: 109, SEQ ID NO: 111, SEQ ID NO: 113, SEQ ID NO: 115, SEQ ID NO: 117, SEQ ID NO: 119, SEQ ID NO: 121, SEQ ID NO: 123, SEQ ID NO: 125, SEQ ID NO: 127, SEQ ID NO: 129, SEQ ID NO: 131, SEQ ID NO: 133, SEQ ID NO: 135, SEQ ID NO: 137, SEQ ID NO: 139, SEQ ID NO: 141, SEQ ID NO: 143, SEQ ID NO: 152, SEQ ID NO: 154, SEQ ID NO: 156, SEQ ID NO: 158, SEQ ID NO: 160, SEQ ID NO: 162, SEQ ID NO: 164, SEQ ID NO: 166, SEQ ID NO: 168, SEQ ID NO: 170, SEQ ID NO: 172, SEQ ID NO: 174, SEQ ID NO: 176, SEQ ID NO: 178, SEQ ID NO: 180, SEQ ID NO: 182, SEQ ID NO: 184, SEQ ID NO: 186, SEQ ID NO: 188, SEQ ID NO: 190, SEQ ID NO: 192, SEQ ID NO: 194, SEQ ID NO: 196, SEQ ID NO: 198, SEQ ID NO: 200, SEQ ID NO: 202, SEQ ID NO: 204, SEQ ID NO: 206, SEQ ID NO: 208, SEQ ID NO: 210, SEQ ID NO: 212, SEQ ID NO: 214, SEQ ID NO: 216, SEQ ID NO: 218, SEQ ID NO: 220, SEQ ID NO: 229, SEQ ID NO:231, SEQ ID NO:233, SEQ ID NO: 235, SEQ ID NO: 237, SEQ ID NO: 239, SEQ ID NO: 241, SEQ ID NO: 243, SEQ ID NO: 250, SEQ ID NO: 252, SEQ ID NO: 254, SEQ ID NO: 256, SEQ ID NO: 258, SEQ ID NO: 260, SEQ ID NO: 262, SEQ ID NO: 264, SEQ ID NO: 266, SEQ ID NO: 268, SEQ ID NO: 270, SEQ ID NO: 272, SEQ ID NO: 283, SEQ ID NO: 285, SEQ ID NO: 287, SEQ ID NO: 289, SEQ ID NO: 291, SEQ ID NO: 293, SEQ ID NO: 295, SEQ ID NO: 297, SEQ ID NO: 299, SEQ ID NO: 301, SEQ ID NO: 303, SEQ ID NO: 305, SEQ ID NO: 307, SEQ ID NO: 309, SEQ ID NO: 311, SEQ ID NO: 313, SEQ ID NO: 315, SEQ ID NO: 317, SEQ ID NO: 319, SEQ ID NO: 321, SEQ ID NO: 323, SEQ ID NO: 325, SEQ ID NO: 327, SEQ ID NO: 329, SEQ ID NO: 331, SEQ ID NO: 333, SEQ ID NO: 335, SEQ ID NO: 337, SEQ ID NO: 339, SEQ ID NO: 341, SEQ ID NO: 343, SEQ ID NO: 345, SEQ ID NO: 347, SEQ ID NO: 349, SEQ ID NO: 351, SEQ ID NO: 353, SEQ ID NO: 355, SEQ ID NO: 357, SEQ ID NO: 359, SEQ ID NO: 361, SEQ ID NO: 363, SEQ ID NO: 365, SEQ ID NO: 367, SEQ ID NO: 369, SEQ ID NO: 371, SEQ ID NO: 373, SEQ ID NO: 375, SEQ ID NO: 377, SEQ ID NO: 379, SEQ ID NO: 381, SEQ ID NO: 383, SEQ ID NO: 385, SEQ ID NO: 387, SEQ ID NO: 389, SEQ ID NO: 391, SEQ ID NO: 393, SEQ ID NO: 395, SEQ ID NO: 397, SEQ ID NO: 399, SEQ ID NO: 401, SEQ ID NO: 403, SEQ ID NO: 405, SEQ ID NO: 407, SEQ ID NO: 409, SEQ ID NO: 411, SEQ ID NO: 413, SEQ ID NO: 415, SEQ ID NO: 417, SEQ ID NO: 419, SEQ ID NO: 421, SEQ ID NO: 423, SEQ ID NO: 425, SEQ ID NO: 427, SEQ ID NO: 429, SEQ ID NO: 431, SEQ ID NO: 433, SEQ ID NO: 435 or SEQ ID NO: 441 such that one or more amino acid substitutions, additions or deletions are introduced into the encoded protein. Mutations can be introduced into the sequences of, e.g. SEQ ID NO: 1, SEQ ID NO: 3, SEQ ID NO: 5, SEQ ID NO: 7, SEQ ID NO: 9, SEQ ID NO: 11, SEQ ID NO: 13, SEQ ID NO: 15, SEQ ID NO: 19, SEQ ID NO: 21, SEQ ID NO: 23, SEQ ID NO: 25, SEQ ID NO: 27, SEQ ID NO: 29, SEQ ID NO: 31; SEQ ID NO: 64, SEQ ID NO: 66, SEQ ID NO: 68, SEQ ID NO: 70, SEQ ID NO: 72, SEQ ID NO: 74, SEQ ID NO: 76, SEQ ID NO: 78, SEQ ID NO: 80, SEQ ID NO: 82, SEQ ID NO: 84, SEQ ID NO: 86, SEQ ID NO: 88, SEQ ID NO: 90, SEQ ID NO: 92, SEQ ID NO: 94, SEQ ID NO: 96, SEQ ID NO: 98, SEQ ID NO: 100, SEQ ID NO: 102, SEQ ID NO: 104, SEQ ID NO: 106, SEQ ID NO: 108, SEQ ID NO: 110, SEQ ID NO: 112, SEQ ID NO: 114, SEQ ID NO: 116, SEQ ID NO: 118, SEQ ID NO: 120, SEQ ID NO: 122, SEQ ID NO: 124, SEQ ID NO: 126, SEQ ID NO: 128, SEQ ID NO: 130, SEQ ID NO: 132, SEQ ID NO: 134, SEQ ID NO: 136, SEQ ID NO: 138, SEQ ID NO: 140, SEQ ID NO: , SEQ ID NO: 142, SEQ ID NO: 151, SEQ ID NO: 153, SEQ ID NO: 155, SEQ ID NO: 157, SEQ ID NO: 159, SEQ ID NO: 161, SEQ ID NO: 163, SEQ ID NO: 165, SEQ ID NO: 167, SEQ ID NO: 169, SEQ ID NO: 171, SEQ ID NO: 173, SEQ ID NO: 175, SEQ ID NO: 177, SEQ ID NO: 179, SEQ ID NO: 181, SEQ ID NO: 183, SEQ ID NO: 185, SEQ ID NO: 187, SEQ ID NO: 189, SEQ ID NO: 191, SEQ ID NO: 193, SEQ ID NO: 195, SEQ ID NO: 197, SEQ ID NO: 199, SEQ ID NO: 201, SEQ ID NO: 203, SEQ ID NO: 205, SEQ ID NO: 207, SEQ ID NO: 209, SEQ ID NO: 211, SEQ ID NO: 213, SEQ ID NO: 215, SEQ ID NO: 217, SEQ ID NO: 219, SEQ ID NO: 228, SEQ ID NO: 230, SEQ ID NO: 232, SEQ ID NO: 234, SEQ ID NO: 236, SEQ ID NO: 238, SEQ ID NO: 240, SEQ ID NO: 242, SEQ ID NO: 249, SEQ ID NO: 251, SEQ ID NO: 253, SEQ ID NO: 255, SEQ ID NO: 257, SEQ ID NO: 259, SEQ ID NO: 261, SEQ ID NO: 263, SEQ ID NO: 265, SEQ ID NO: 267, SEQ ID NO: 269, SEQ ID NO: 271, SEQ ID NO: 282, SEQ ID NO: 284, SEQ ID NO: 286, SEQ ID NO: 288, SEQ ID NO: 290, SEQ ID NO: 292, SEQ ID NO: 294, SEQ ID NO: 296, SEQ ID NO: 298, SEQ ID NO: 300, SEQ ID NO: 302, SEQ ID NO: 304, SEQ ID NO: 306, SEQ ID NO: 308, SEQ ID NO: 310, SEQ ID NO: 312, SEQ ID NO: 314, SEQ ID NO: 316, SEQ ID NO: 318, SEQ ID NO: 320, SEQ ID NO: 322, SEQ ID NO: 324, SEQ ID NO: 326, SEQ ID NO: 328, SEQ ID NO: 330, SEQ ID NO: 332, SEQ ID NO: 334, SEQ ID NO: 336, SEQ ID NO: 338, SEQ ID NO: 340, SEQ ID NO: 342, SEQ ID NO: 344, SEQ ID NO: 346, SEQ ID NO: 348, SEQ ID NO: 350, SEQ ID NO: 352, SEQ ID NO: 354, SEQ ID NO: 356, SEQ ID NO: 358, SEQ ID NO: 360, SEQ ID NO: 362, SEQ ID NO: 364, SEQ ID NO: 366, SEQ ID NO: 368, SEQ ID NO: 370, SEQ ID NO: 372, SEQ ID NO: 374, SEQ ID NO: 376, SEQ ID NO: 378, SEQ ID NO: 380, SEQ ID NO: 382, SEQ ID NO: 384, SEQ ID NO: 386, SEQ ID NO: 388, SEQ ID NO: 390, SEQ ID NO: 392, SEQ ID NO: 394, SEQ ID NO: 396, SEQ ID NO: 398, SEQ ID NO: 400, SEQ ID NO: 402, SEQ ID NO: 404, SEQ ID NO: 406, SEQ ID NO: 408, SEQ ID NO: 410, SEQ ID NO: 412, SEQ ID NO: 414, SEQ ID NO: 416, SEQ ID NO: 418, SEQ ID NO: 420, SEQ ID NO: 422, SEQ ID NO: 424, SEQ ID NO: 426, SEQ ID NO: 428, SEQ ID NO: 430, SEQ ID NO: 432, SEQ ID NO: 434 or SEQ ID NO: 440 by standard techniques, such as site-directed mutagenesis and PCR-mediated mutagenesis.

[0304] Preferably, non-conservative amino acid substitutions are made at one or more predicted non-essential or preferably essential amino acid residues and thereby reducing, decreasing or deleting the activity of the respective protein. A “conservative amino acid substitution” is one in which the amino acid residue is replaced with an amino acid residue having a similar side chain. Families of amino acid residues having similar side chains have been defined in the art. These families include amino acids with basic side chains (e.g., lysine, arginine, histidine), acidic side chains (e.g., aspartic acid, glutamic acid), uncharged polar side chains (e.g., glycine, asparagine, glutamine, serine, threonine, tyrosine, cysteine), nonpolar side chains (e.g., alanine, valine, leucine, isoleucine, proline, phenylalanine, methionine, tryptophan), beta-branched side chains (e.g., threonine, valine, isoleucine) and aromatic side chains (e.g., tyrosine, phenylalanine, tryptophan, histidine).

[0305] Thus, a predicted nonessential or essential amino acid residue in a polypeptide of the invention is preferably replaced with another amino acid residue from another family. Alternatively, in another embodiment, mutations can be introduced randomly along all or part of a coding sequence of a nucleic acid molecule of the invention, such as by saturation mutagenesis, and the resultant mutants can be screened for activity described herein to identify mutants that lost or have decreased biological activity, e.g. conferring an increase in the fine chemical content.

[0306] Following mutagenesis of one of the sequences of SEQ ID NO: 1, SEQ ID NO: 3, SEQ ID NO: 5, SEQ ID NO: 7, SEQ ID NO: 9, SEQ ID NO: 11, SEQ ID NO: 13, SEQ ID NO: 15, SEQ ID NO: 19, SEQ ID NO: 21, SEQ ID NO: 23, SEQ ID NO: 25, SEQ ID NO: 27, SEQ ID NO: 29, SEQ ID NO: 31; SEQ ID NO: 64, SEQ ID NO: 66, SEQ ID NO: 68, SEQ ID NO: 70, SEQ ID NO: 72, SEQ ID NO: 74, SEQ ID NO: 76, SEQ ID NO: 78, SEQ ID NO: 80, SEQ ID NO: 82, SEQ ID NO: 84, SEQ ID NO: 86, SEQ ID NO: 88, SEQ ID NO: 90, SEQ ID NO: 92, SEQ ID NO: 94, SEQ ID NO: 96, SEQ ID NO: 98, SEQ ID NO: 100, SEQ ID NO: 102, SEQ ID NO: 104, SEQ ID NO: 106, SEQ ID NO: 108, SEQ ID NO: 110, SEQ ID NO: 112, SEQ ID NO: 114, SEQ ID NO: 116, SEQ ID NO: 118, SEQ ID NO: 120, SEQ ID NO: 122, SEQ ID NO: 124, SEQ ID NO: 126, SEQ ID NO: 128, SEQ ID NO: 130, SEQ ID NO: 132, SEQ ID NO: 134, SEQ ID NO: 136, SEQ ID NO: 138, SEQ ID NO: 140, SEQ ID NO: , SEQ ID NO: 142, SEQ ID NO: 151, SEQ ID NO: 153, SEQ ID NO: 155, SEQ ID NO: 157, SEQ ID NO: 159, SEQ ID NO: 161, SEQ ID NO: 163, SEQ ID NO: 165, SEQ ID NO: 167, SEQ ID NO: 169, SEQ ID NO: 171, SEQ ID NO: 173, SEQ ID NO: 175, SEQ ID NO: 177, SEQ ID NO: 179, SEQ ID NO: 181, SEQ ID NO: 183, SEQ ID NO: 185, SEQ ID NO: 187, SEQ ID NO: 189, SEQ ID NO: 191, SEQ ID NO: 193, SEQ ID NO: 195, SEQ ID NO: 197, SEQ ID NO: 199, SEQ ID NO: 201, SEQ ID NO: 203, SEQ ID NO: 205, SEQ ID NO: 207, SEQ ID NO: 209, SEQ ID NO: 211, SEQ ID NO: 213, SEQ ID NO: 215, SEQ ID NO: 217, SEQ ID NO: 219, SEQ ID NO: 228, SEQ ID NO: 230, SEQ ID NO: 232, SEQ ID NO: 234, SEQ ID NO: 236, SEQ ID NO: 238, SEQ ID NO: 240, SEQ ID NO: 242, SEQ ID NO: 249, SEQ ID NO: 251, SEQ ID NO: 253, SEQ ID NO: 255, SEQ ID NO: 257, SEQ ID NO: 259, SEQ ID NO: 261, SEQ ID NO: 263, SEQ ID NO: 265, SEQ ID NO: 267, SEQ ID NO: 269, SEQ ID NO: 271, SEQ ID NO: 282, SEQ ID NO: 284, SEQ ID NO: 286, SEQ ID NO: 288, SEQ ID NO: 290, SEQ ID NO: 292, SEQ ID NO: 294, SEQ ID NO: 296, SEQ ID NO: 298, SEQ ID NO: 300, SEQ ID NO: 302, SEQ ID NO: 304, SEQ ID NO: 306, SEQ ID NO: 308, SEQ ID NO: 310, SEQ ID NO: 312, SEQ ID NO: 314, SEQ ID NO: 316, SEQ ID NO: 318, SEQ ID NO: 320, SEQ ID NO: 322, SEQ ID NO: 324, SEQ ID NO: 326, SEQ ID NO: 328, SEQ ID NO: 330, SEQ ID NO: 332, SEQ ID NO: 334, SEQ ID NO: 336, SEQ ID NO: 338, SEQ ID NO: 340, SEQ ID NO: 342, SEQ ID NO: 344, SEQ ID NO: 346, SEQ ID NO: 348, SEQ ID NO: 350, SEQ ID NO: 352, SEQ ID NO: 354, SEQ ID NO: 356, SEQ ID NO: 358, SEQ ID NO: 360, SEQ ID NO: 362, SEQ ID NO: 364, SEQ ID NO: 366, SEQ ID NO: 368, SEQ ID NO: 370, SEQ ID NO: 372, SEQ ID NO: 374, SEQ ID NO: 376, SEQ ID NO: 378, SEQ ID NO: 380, SEQ ID NO: 382, SEQ ID NO: 384, SEQ ID NO: 386, SEQ ID NO: 388, SEQ ID NO: 390, SEQ ID NO: 392, SEQ ID NO: 394, SEQ ID NO: 396, SEQ ID NO: 398, SEQ ID NO: 400, SEQ ID NO: 402, SEQ ID NO: 404, SEQ ID NO: 406, SEQ ID NO: 408, SEQ ID NO: 410, SEQ ID NO: 412, SEQ ID NO: 414, SEQ ID NO: 416, SEQ ID NO: 418, SEQ ID NO: 420, SEQ ID NO: 422, SEQ ID NO: 424, SEQ ID NO: 426, SEQ ID NO: 428, SEQ ID NO: 430, SEQ ID NO: 432, SEQ ID NO: 434 or SEQ ID NO: 440 the encoded protein can be expressed recombinantly and the activity of the protein can be determined using, for example, assays described herein (see Examples).

[0307] The highest homology of the nucleic acid molecule used in the process according to the invention was found for the following database entries by Gap search:

| Hit | Best Homolog | % Identity |
|---|---|---|
| At2g25320 (RefSeq | At2g25330 | 35 |
| Accession NM_128089) | | |
| At3g07610 (RefSeq | NP_172659 | 33 |
| Accession NP_187418) | | |
| at3g 15600 (RefSeq | NP_178820.1 | 83 |
| Accession NM_112428.1) | | |
| At1g 14490 (RefSeq | SPTREMBL_Q9LTA2 | 69 |
| Accession NM_101316) | | |
| At1g30570 (RefSeq | SPTREMBL_Q7XTT9 | 53 |
| Accession NM_102794) | | |
| At2g21290 (RefSeq | bn43069381 | 85 |
| Accession NM_127701) | | |
| At3g 14230 (RefSeq | REMTREMBL_{—} | 98 |
| Accession NM_180251) | CAD88898 | |

[0308] Homologues of the nucleic acid sequences used, with the sequence SEQ ID NO: 1, SEQ ID NO: 3, SEQ ID NO: 5, SEQ ID NO: 7, SEQ ID NO: 9, SEQ ID NO: 11, SEQ ID NO: 13, SEQ ID NO: 15, SEQ ID NO: 19, SEQ ID NO: 21, SEQ ID NO: 23, SEQ ID NO: 25, SEQ ID NO: 27, SEQ ID NO: 29, SEQ ID NO: 31; SEQ ID NO: 64, SEQ ID NO: 66, SEQ ID NO: 68, SEQ ID NO: 70, SEQ ID NO: 72, SEQ ID NO: 74, SEQ ID NO: 76, SEQ ID NO: 78, SEQ ID NO: 80, SEQ ID NO: 82, SEQ ID NO: 84, SEQ ID NO: 86, SEQ ID NO: 88, SEQ ID NO: 90, SEQ ID NO: 92, SEQ ID NO: 94, SEQ ID NO: 96, SEQ ID NO: 98, SEQ ID NO: 100, SEQ ID NO: 102, SEQ ID NO: 104, SEQ ID NO: 106, SEQ ID NO: 108, SEQ ID NO: 110, SEQ ID NO: 112, SEQ ID NO: 114, SEQ ID NO: 116, SEQ ID NO: 118, SEQ ID NO: 120, SEQ ID NO: 122, SEQ ID NO: 124, SEQ ID NO: 126, SEQ ID NO: 128, SEQ ID NO: 130, SEQ ID NO: 132, SEQ ID NO: 134, SEQ ID NO: 136, SEQ ID NO: 138, SEQ ID NO: 140, SEQ ID NO: , SEQ ID NO: 142, SEQ ID NO: 151, SEQ ID NO: 153, SEQ ID NO: 155, SEQ ID NO: 157, SEQ ID NO: 159, SEQ ID NO: 161, SEQ ID NO: 163, SEQ ID NO: 165, SEQ ID NO: 167, SEQ ID NO: 169, SEQ ID NO: 171, SEQ ID NO: 173, SEQ ID NO: 175, SEQ ID NO: 177, SEQ ID NO: 179, SEQ ID NO: 181, SEQ ID NO: 183, SEQ ID NO: 185, SEQ ID NO: 187, SEQ ID NO: 189, SEQ ID NO: 191, SEQ ID NO: 193, SEQ ID NO: 195, SEQ ID NO: 197, SEQ ID NO: 199, SEQ ID NO: 201, SEQ ID NO: 203, SEQ ID NO: 205, SEQ ID NO: 207, SEQ ID NO: 209, SEQ ID NO: 211, SEQ ID NO: 213, SEQ ID NO: 215, SEQ ID NO: 217, SEQ ID NO: 219, SEQ ID NO: 228, SEQ ID NO: 230, SEQ ID NO: 232, SEQ ID NO: 234, SEQ ID NO: 236, SEQ ID NO: 238, SEQ ID NO: 240, SEQ ID NO: 242, SEQ ID NO: 249, SEQ ID NO: 251, SEQ ID NO: 253, SEQ ID NO: 255, SEQ ID NO: 257, SEQ ID NO: 259, SEQ ID NO: 261, SEQ ID NO: 263, SEQ ID NO: 265, SEQ ID NO: 267, SEQ ID NO: 269, SEQ ID NO: 271, SEQ ID NO: 282, SEQ ID NO: 284, SEQ ID NO: 286, SEQ ID NO: 288, SEQ ID NO: 290, SEQ ID NO: 292, SEQ ID NO: 294, SEQ ID NO: 296, SEQ ID NO: 298, SEQ ID NO: 300, SEQ ID NO: 302, SEQ ID NO: 304, SEQ ID NO: 306, SEQ ID NO: 308, SEQ ID NO: 310, SEQ ID NO: 312, SEQ ID NO: 314, SEQ ID NO: 316, SEQ ID NO: 318, SEQ ID NO: 320, SEQ ID NO: 322, SEQ ID NO: 324, SEQ ID NO: 326, SEQ ID NO: 328, SEQ ID NO: 330, SEQ ID NO: 332, SEQ ID NO: 334, SEQ ID NO: 336, SEQ ID NO: 338, SEQ ID NO: 340, SEQ ID NO: 342, SEQ ID NO: 344, SEQ ID NO: 346, SEQ ID NO: 348, SEQ ID NO: 350, SEQ ID NO: 352, SEQ ID NO: 354, SEQ ID NO: 356, SEQ ID NO: 358, SEQ ID NO: 360, SEQ ID NO: 362, SEQ ID NO: 364, SEQ ID NO: 366, SEQ ID NO: 368, SEQ ID NO: 370, SEQ ID NO: 372, SEQ ID NO: 374, SEQ ID NO: 376, SEQ ID NO: 378, SEQ ID NO: 380, SEQ ID NO: 382, SEQ ID NO: 384, SEQ ID NO: 386, SEQ ID NO: 388, SEQ ID NO: 390, SEQ ID NO: 392, SEQ ID NO: 394, SEQ ID NO: 396, SEQ ID NO: 398, SEQ ID NO: 400, SEQ ID NO: 402, SEQ ID NO: 404, SEQ ID NO: 406, SEQ ID NO: 408, SEQ ID NO: 410, SEQ ID NO: 412, SEQ ID NO: 414, SEQ ID NO: 416, SEQ ID NO: 418, SEQ ID NO: 420, SEQ ID NO: 422, SEQ ID NO: 424, SEQ ID NO: 426, SEQ ID NO: 428, SEQ ID NO: 430, SEQ ID NO: 432, SEQ ID NO: 434 or SEQ ID NO: 440 or of the nucleic acid sequences derived from the sequences SEQ ID NO: 2, SEQ ID NO: 4, SEQ ID NO: 6, SEQ ID NO: 8, SEQ ID NO: 10, SEQ ID NO: 12, SEQ ID NO: 14, SEQ ID NO: 16, SEQ ID NO: 20, SEQ ID NO: 22, SEQ ID NO: 24, SEQ ID NO: 26, SEQ ID NO: 28, SEQ ID NO. 30, SEQ ID NO: 32; SEQ ID NO: 65, SEQ ID NO: 67, SEQ ID NO: 69, SEQ ID NO: 71, SEQ ID NO: 73, SEQ ID NO: 75, SEQ ID NO: 77, SEQ ID NO: 79, SEQ ID NO: 81, SEQ ID NO: 83, SEQ ID NO: 85, SEQ ID NO: 87, SEQ ID NO: 89, SEQ ID NO: 91, SEQ ID NO: 93, SEQ ID NO: 95, SEQ ID NO: 97, SEQ ID NO: 99, SEQ ID NO: 101, SEQ ID NO: 103, SEQ ID NO: 105, SEQ ID NO: 107, SEQ ID NO: 109, SEQ ID NO: 111, SEQ ID NO: 113, SEQ ID NO: 115, SEQ ID NO: 117, SEQ ID NO: 119, SEQ ID NO: 121, SEQ ID NO: 123, SEQ ID NO: 125, SEQ ID NO: 127, SEQ ID NO: 129, SEQ ID NO: 131, SEQ ID NO: 133, SEQ ID NO: 135, SEQ ID NO: 137, SEQ ID NO: 139, SEQ ID NO: 141, SEQ ID NO: 143, SEQ ID NO: 152, SEQ ID NO: 154, SEQ ID NO: 156, SEQ ID NO: 158, SEQ ID NO: 160, SEQ ID NO: 162, SEQ ID NO: 164, SEQ ID NO: 166, SEQ ID NO: 168, SEQ ID NO: 170, SEQ ID NO: 172, SEQ ID NO: 174, SEQ ID NO: 176, SEQ ID NO: 178, SEQ ID NO: 180, SEQ ID NO: 182, SEQ ID NO: 184, SEQ ID NO: 186, SEQ ID NO: 188, SEQ ID NO: 190, SEQ ID NO: 192, SEQ ID NO: 194, SEQ ID NO: 196, SEQ ID NO: 198, SEQ ID NO: 200, SEQ ID NO: 202, SEQ ID NO: 204, SEQ ID NO: 206, SEQ ID NO: 208, SEQ ID NO: 210, SEQ ID NO: 212, SEQ ID NO: 214, SEQ ID NO: 216, SEQ ID NO: 218, SEQ ID NO: 220, SEQ ID NO: 229, SEQ ID NO:231, SEQ ID NO:233, SEQ ID NO: 235, SEQ ID NO: 237, SEQ ID NO: 239, SEQ ID NO: 241, SEQ ID NO: 243, SEQ ID NO: 250, SEQ ID NO: 252, SEQ ID NO: 254, SEQ ID NO: 256, SEQ ID NO: 258, SEQ ID NO: 260, SEQ ID NO: 262, SEQ ID NO: 264, SEQ ID NO: 266, SEQ ID NO: 268, SEQ ID NO: 270, SEQ ID NO: 272, SEQ ID NO: 283, SEQ ID NO: 285, SEQ ID NO: 287, SEQ ID NO: 289, SEQ ID NO: 291, SEQ ID NO: 293, SEQ ID NO: 295, SEQ ID NO: 297, SEQ ID NO: 299, SEQ ID NO: 301, SEQ ID NO: 303, SEQ ID NO: 305, SEQ ID NO: 307, SEQ ID NO: 309, SEQ ID NO: 311, SEQ ID NO: 313, SEQ ID NO: 315, SEQ ID NO: 317, SEQ ID NO: 319, SEQ ID NO: 321, SEQ ID NO: 323, SEQ ID NO: 325, SEQ ID NO: 327, SEQ ID NO: 329, SEQ ID NO: 331, SEQ ID NO: 333, SEQ ID NO: 335, SEQ ID NO: 337, SEQ ID NO: 339, SEQ ID NO: 341, SEQ ID NO: 343, SEQ ID NO: 345, SEQ ID NO: 347, SEQ ID NO: 349, SEQ ID NO: 351, SEQ ID NO: 353, SEQ ID NO: 355, SEQ ID NO: 357, SEQ ID NO: 359, SEQ ID NO: 361, SEQ ID NO: 363, SEQ ID NO: 365, SEQ ID NO: 367, SEQ ID NO: 369, SEQ ID NO: 371, SEQ ID NO: 373, SEQ ID NO: 375, SEQ ID NO: 377, SEQ ID NO: 379, SEQ ID NO: 381, SEQ ID NO: 383, SEQ ID NO: 385, SEQ ID NO: 387, SEQ ID NO: 389, SEQ ID NO: 391, SEQ ID NO: 393, SEQ ID NO: 395, SEQ ID NO: 397, SEQ ID NO: 399, SEQ ID NO: 401, SEQ ID NO: 403, SEQ ID NO: 405, SEQ ID NO: 407, SEQ ID NO: 409, SEQ ID NO: 411, SEQ ID NO: 413, SEQ ID NO: 415, SEQ ID NO: 417, SEQ ID NO: 419, SEQ ID NO: 421, SEQ ID NO: 423, SEQ ID NO: 425, SEQ ID NO: 427, SEQ ID NO: 429, SEQ ID NO: 431, SEQ ID NO: 433, SEQ ID NO: 435 or SEQ ID NO: 441 comprise also allelic variants with at least approximately 30%, 35%, 40% or 45% homology, by preference at least approximately 50%, 60% or 70%, more preferably at least approximately 90%, 91%, 92%, 93%, 94% or 95% and even more preferably at least approximately 96%, 97%, 98%, 99% or more homology with one of the nucleotide sequences shown or the abovementioned derived nucleic acid sequences or their homologues, derivatives or analogues or parts of these. Allelic variants encompass in particular functional variants which can be obtained by deletion, insertion or substitution of nucleotides from the sequences shown, preferably from SEQ ID NO: 1, SEQ ID NO: 3, SEQ ID NO: 5, SEQ ID NO: 7, SEQ ID NO: 9, SEQ ID NO: 11, SEQ ID NO: 13, SEQ ID NO: 15, SEQ ID NO: 19, SEQ ID NO: 21, SEQ ID NO: 23, SEQ ID NO: 25, SEQ ID NO: 27, SEQ ID NO: 29, SEQ ID NO: 31; SEQ ID NO: 64, SEQ ID NO: 66, SEQ ID NO: 68, SEQ ID NO: 70, SEQ ID NO: 72, SEQ ID NO: 74, SEQ ID NO: 76, SEQ ID NO: 78, SEQ ID NO: 80, SEQ ID NO: 82, SEQ ID NO: 84, SEQ ID NO: 86, SEQ ID NO: 88, SEQ ID NO: 90, SEQ ID NO: 92, SEQ ID NO: 94, SEQ ID NO: 96, SEQ ID NO: 98, SEQ ID NO: 100, SEQ ID NO: 102, SEQ ID NO: 104, SEQ ID NO: 106, SEQ ID NO: 108, SEQ ID NO: 110, SEQ ID NO: 112, SEQ ID NO: 114, SEQ ID NO: 116, SEQ ID NO: 118, SEQ ID NO: 120, SEQ ID NO: 122, SEQ ID NO: 124, SEQ ID NO: 126, SEQ ID NO: 128, SEQ ID NO: 130, SEQ ID NO: 132, SEQ ID NO: 134, SEQ ID NO: 136, SEQ ID NO: 138, SEQ ID NO: 140, SEQ ID NO: , SEQ ID NO: 142, SEQ ID NO: 151, SEQ ID NO: 153, SEQ ID NO: 155, SEQ ID NO: 157, SEQ ID NO: 159, SEQ ID NO: 161, SEQ ID NO: 163, SEQ ID NO: 165, SEQ ID NO: 167, SEQ ID NO: 169, SEQ ID NO: 171, SEQ ID NO: 173, SEQ ID NO: 175, SEQ ID NO: 177, SEQ ID NO: 179, SEQ ID NO: 181, SEQ ID NO: 183, SEQ ID NO: 185, SEQ ID NO: 187, SEQ ID NO: 189, SEQ ID NO: 191, SEQ ID NO: 193, SEQ ID NO: 195, SEQ ID NO: 197, SEQ ID NO: 199, SEQ ID NO: 201, SEQ ID NO: 203, SEQ ID NO: 205, SEQ ID NO: 207, SEQ ID NO: 209, SEQ ID NO: 211, SEQ ID NO: 213, SEQ ID NO: 215, SEQ ID NO: 217, SEQ ID NO: 219, SEQ ID NO: 228, SEQ ID NO: 230, SEQ ID NO: 232, SEQ ID NO: 234, SEQ ID NO: 236, SEQ ID NO: 238, SEQ ID NO: 240, SEQ ID NO: 242, SEQ ID NO: 249, SEQ ID NO: 251, SEQ ID NO: 253, SEQ ID NO: 255, SEQ ID NO: 257, SEQ ID NO: 259, SEQ ID NO: 261, SEQ ID NO: 263, SEQ ID NO: 265, SEQ ID NO: 267, SEQ ID NO: 269, SEQ ID NO: 271, SEQ ID NO: 282, SEQ ID NO: 284, SEQ ID NO: 286, SEQ ID NO: 288, SEQ ID NO: 290, SEQ ID NO: 292, SEQ ID NO: 294, SEQ ID NO: 296, SEQ ID NO: 298, SEQ ID NO: 300, SEQ ID NO: 302, SEQ ID NO: 304, SEQ ID NO: 306, SEQ ID NO: 308, SEQ ID NO: 310, SEQ ID NO: 312, SEQ ID NO: 314, SEQ ID NO: 316, SEQ ID NO: 318, SEQ ID NO: 320, SEQ ID NO: 322, SEQ ID NO: 324, SEQ ID NO: 326, SEQ ID NO: 328, SEQ ID NO: 330, SEQ ID NO: 332, SEQ ID NO: 334, SEQ ID NO: 336, SEQ ID NO: 338, SEQ ID NO: 340, SEQ ID NO: 342, SEQ ID NO: 344, SEQ ID NO: 346, SEQ ID NO: 348, SEQ ID NO: 350, SEQ ID NO: 352, SEQ ID NO: 354, SEQ ID NO: 356, SEQ ID NO: 358, SEQ ID NO: 360, SEQ ID NO: 362, SEQ ID NO: 364, SEQ ID NO: 366, SEQ ID NO: 368, SEQ ID NO: 370, SEQ ID NO: 372, SEQ ID NO: 374, SEQ ID NO: 376, SEQ ID NO: 378, SEQ ID NO: 380, SEQ ID NO: 382, SEQ ID NO: 384, SEQ ID NO: 386, SEQ ID NO: 388, SEQ ID NO: 390, SEQ ID NO: 392, SEQ ID NO: 394, SEQ ID NO: 396, SEQ ID NO: 398, SEQ ID NO: 400, SEQ ID NO: 402, SEQ ID NO: 404, SEQ ID NO: 406, SEQ ID NO: 408, SEQ ID NO: 410, SEQ ID NO: 412, SEQ ID NO: 414, SEQ ID NO: 416, SEQ ID NO: 418, SEQ ID NO: 420, SEQ ID NO: 422, SEQ ID NO: 424, SEQ ID NO: 426, SEQ ID NO: 428, SEQ ID NO: 430, SEQ ID NO: 432, SEQ ID NO: 434 or SEQ ID NO: 440, or from the derived nucleic acid sequences, the intention being, however, that the enzyme activity or the biological activity of the resulting proteins synthesized is advantageously lost or decreased.

[0309] In one embodiment of the present invention, the nucleic acid molecule comprises the sequences shown in any of the SEQ ID NO: 1, SEQ ID NO: 3, SEQ ID NO: 5, SEQ ID NO: 7, SEQ ID NO: 9, SEQ ID NO: 11, SEQ ID NO: 13, SEQ ID NO: 15, SEQ ID NO: 19, SEQ ID NO: 21, SEQ ID NO: 23, SEQ ID NO: 25, SEQ ID NO: 27, SEQ ID NO: 29, SEQ ID NO: 31; SEQ ID NO: 64, SEQ ID NO: 66, SEQ ID NO: 68, SEQ ID NO: 70, SEQ ID NO: 72, SEQ ID NO: 74, SEQ ID NO: 76, SEQ ID NO: 78, SEQ ID NO: 80, SEQ ID NO: 82, SEQ ID NO: 84, SEQ ID NO: 86, SEQ ID NO: 88, SEQ ID NO: 90, SEQ ID NO: 92, SEQ ID NO: 94, SEQ ID NO: 96, SEQ ID NO: 98, SEQ ID NO: 100, SEQ ID NO: 102, SEQ ID NO: 104, SEQ ID NO: 106, SEQ ID NO: 108, SEQ ID NO: 110, SEQ ID NO: 112, SEQ ID NO: 114, SEQ ID NO: 116, SEQ ID NO: 118, SEQ ID NO: 120, SEQ ID NO: 122, SEQ ID NO: 124, SEQ ID NO: 126, SEQ ID NO: 128, SEQ ID NO: 130, SEQ ID NO: 132, SEQ ID NO: 134, SEQ ID NO: 136, SEQ ID NO: 138, SEQ ID NO: 140, SEQ ID NO: , SEQ ID NO: 142, SEQ ID NO: 151, SEQ ID NO: 153, SEQ ID NO: 155, SEQ ID NO: 157, SEQ ID NO: 159, SEQ ID NO: 161, SEQ ID NO: 163, SEQ ID NO: 165, SEQ ID NO: 167, SEQ ID NO: 169, SEQ ID NO: 171, SEQ ID NO: 173, SEQ ID NO: 175, SEQ ID NO: 177, SEQ ID NO: 179, SEQ ID NO: 181, SEQ ID NO: 183, SEQ ID NO: 185, SEQ ID NO: 187, SEQ ID NO: 189, SEQ ID NO: 191, SEQ ID NO: 193, SEQ ID NO: 195, SEQ ID NO: 197, SEQ ID NO: 199, SEQ ID NO: 201, SEQ ID NO: 203, SEQ ID NO: 205, SEQ ID NO: 207, SEQ ID NO: 209, SEQ ID NO: 211, SEQ ID NO: 213, SEQ ID NO: 215, SEQ ID NO: 217, SEQ ID NO: 219, SEQ ID NO: 228, SEQ ID NO: 230, SEQ ID NO: 232, SEQ ID NO: 234, SEQ ID NO: 236, SEQ ID NO: 238, SEQ ID NO: 240, SEQ ID NO: 242, SEQ ID NO: 249, SEQ ID NO: 251, SEQ ID NO: 253, SEQ ID NO: 255, SEQ ID NO: 257, SEQ ID NO: 259, SEQ ID NO: 261, SEQ ID NO: 263, SEQ ID NO: 265, SEQ ID NO: 267, SEQ ID NO: 269, SEQ ID NO: 271, SEQ ID NO: 282, SEQ ID NO: 284, SEQ ID NO: 286, SEQ ID NO: 288, SEQ ID NO: 290, SEQ ID NO: 292, SEQ ID NO: 294, SEQ ID NO: 296, SEQ ID NO: 298, SEQ ID NO: 300, SEQ ID NO: 302, SEQ ID NO: 304, SEQ ID NO: 306, SEQ ID NO: 308, SEQ ID NO: 310, SEQ ID NO: 312, SEQ ID NO: 314, SEQ ID NO: 316, SEQ ID NO: 318, SEQ ID NO: 320, SEQ ID NO: 322, SEQ ID NO: 324, SEQ ID NO: 326, SEQ ID NO: 328, SEQ ID NO: 330, SEQ ID NO: 332, SEQ ID NO: 334, SEQ ID NO: 336, SEQ ID NO: 338, SEQ ID NO: 340, SEQ ID NO: 342, SEQ ID NO: 344, SEQ ID NO: 346, SEQ ID NO: 348, SEQ ID NO: 350, SEQ ID NO: 352, SEQ ID NO: 354, SEQ ID NO: 356, SEQ ID NO: 358, SEQ ID NO: 360, SEQ ID NO: 362, SEQ ID NO: 364, SEQ ID NO: 366, SEQ ID NO: 368, SEQ ID NO: 370, SEQ ID NO: 372, SEQ ID NO: 374, SEQ ID NO: 376, SEQ ID NO: 378, SEQ ID NO: 380, SEQ ID NO: 382, SEQ ID NO: 384, SEQ ID NO: 386, SEQ ID NO: 388, SEQ ID NO: 390, SEQ ID NO: 392, SEQ ID NO: 394, SEQ ID NO: 396, SEQ ID NO: 398, SEQ ID NO: 400, SEQ ID NO: 402, SEQ ID NO: 404, SEQ ID NO: 406, SEQ ID NO: 408, SEQ ID NO: 410, SEQ ID NO: 412, SEQ ID NO: 414, SEQ ID NO: 416, SEQ ID NO: 418, SEQ ID NO: 420, SEQ ID NO: 422, SEQ ID NO: 424, SEQ ID NO: 426, SEQ ID NO: 428, SEQ ID NO: 430, SEQ ID NO: 432, SEQ ID NO: 434 or SEQ ID NO: 440. It is preferred that the nucleic acid molecule comprises as little as possible other nucleotides not shown in any one of SEQ ID NO: 1, SEQ ID NO: 3, SEQ ID NO: 5, SEQ ID NO: 7, SEQ ID NO: 9, SEQ ID NO: 11, SEQ ID NO: 13, SEQ ID NO: 15, SEQ ID NO: 19, SEQ ID NO: 21, SEQ ID NO: 23, SEQ ID NO: 25, SEQ ID NO: 27, SEQ ID NO: 29, SEQ ID NO: 31; SEQ ID NO: 64, SEQ ID NO: 66, SEQ ID NO: 68, SEQ ID NO: 70, SEQ ID NO: 72, SEQ ID NO: 74, SEQ ID NO: 76, SEQ ID NO: 78, SEQ ID NO: 80, SEQ ID NO: 82, SEQ ID NO: 84, SEQ ID NO: 86, SEQ ID NO: 88, SEQ ID NO: 90, SEQ ID NO: 92, SEQ ID NO: 94, SEQ ID NO: 96, SEQ ID NO: 98, SEQ ID NO: 100, SEQ ID NO: 102, SEQ ID NO: 104, SEQ ID NO: 106, SEQ ID NO: 108, SEQ ID NO: 110, SEQ ID NO: 112, SEQ ID NO: 114, SEQ ID NO: 116, SEQ ID NO: 118, SEQ ID NO: 120, SEQ ID NO: 122, SEQ ID NO: 124, SEQ ID NO: 126, SEQ ID NO: 128, SEQ ID NO: 130, SEQ ID NO: 132, SEQ ID NO: 134, SEQ ID NO: 136, SEQ ID NO: 138, SEQ ID NO: 140, SEQ ID NO: , SEQ ID NO: 142, SEQ ID NO: 151, SEQ ID NO: 153, SEQ ID NO: 155, SEQ ID NO: 157, SEQ ID NO: 159, SEQ ID NO: 161, SEQ ID NO: 163, SEQ ID NO: 165, SEQ ID NO: 167, SEQ ID NO: 169, SEQ ID NO: 171, SEQ ID NO: 173, SEQ ID NO: 175, SEQ ID NO: 177, SEQ ID NO: 179, SEQ ID NO: 181, SEQ ID NO: 183, SEQ ID NO: 185, SEQ ID NO: 187, SEQ ID NO: 189, SEQ ID NO: 191, SEQ ID NO: 193, SEQ ID NO: 195, SEQ ID NO: 197, SEQ ID NO: 199, SEQ ID NO: 201, SEQ ID NO: 203, SEQ ID NO: 205, SEQ ID NO: 207, SEQ ID NO: 209, SEQ ID NO: 211, SEQ ID NO: 213, SEQ ID NO: 215, SEQ ID NO: 217, SEQ ID NO: 219, SEQ ID NO: 228, SEQ ID NO: 230, SEQ ID NO: 232, SEQ ID NO: 234, SEQ ID NO: 236, SEQ ID NO: 238, SEQ ID NO: 240, SEQ ID NO: 242, SEQ ID NO: 249, SEQ ID NO: 251, SEQ ID NO: 253, SEQ ID NO: 255, SEQ ID NO: 257, SEQ ID NO: 259, SEQ ID NO: 261, SEQ ID NO: 263, SEQ ID NO: 265, SEQ ID NO: 267, SEQ ID NO: 269, SEQ ID NO: 271, SEQ ID NO: 282, SEQ ID NO: 284, SEQ ID NO: 286, SEQ ID NO: 288, SEQ ID NO: 290, SEQ ID NO: 292, SEQ ID NO: 294, SEQ ID NO: 296, SEQ ID NO: 298, SEQ ID NO: 300, SEQ ID NO: 302, SEQ ID NO: 304, SEQ ID NO: 306, SEQ ID NO: 308, SEQ ID NO: 310, SEQ ID NO: 312, SEQ ID NO: 314, SEQ ID NO: 316, SEQ ID NO: 318, SEQ ID NO: 320, SEQ ID NO: 322, SEQ ID NO: 324, SEQ ID NO: 326, SEQ ID NO: 328, SEQ ID NO: 330, SEQ ID NO: 332, SEQ ID NO: 334, SEQ ID NO: 336, SEQ ID NO: 338, SEQ ID NO: 340, SEQ ID NO: 342, SEQ ID NO: 344, SEQ ID NO: 346, SEQ ID NO: 348, SEQ ID NO: 350, SEQ ID NO: 352, SEQ ID NO: 354, SEQ ID NO: 356, SEQ ID NO: 358, SEQ ID NO: 360, SEQ ID NO: 362, SEQ ID NO: 364, SEQ ID NO: 366, SEQ ID NO: 368, SEQ ID NO: 370, SEQ ID NO: 372, SEQ ID NO: 374, SEQ ID NO: 376, SEQ ID NO: 378, SEQ ID NO: 380, SEQ ID NO: 382, SEQ ID NO: 384, SEQ ID NO: 386, SEQ ID NO: 388, SEQ ID NO: 390, SEQ ID NO: 392, SEQ ID NO: 394, SEQ ID NO: 396, SEQ ID NO: 398, SEQ ID NO: 400, SEQ ID NO: 402, SEQ ID NO: 404, SEQ ID NO: 406, SEQ ID NO: 408, SEQ ID NO: 410, SEQ ID NO: 412, SEQ ID NO: 414, SEQ ID NO: 416, SEQ ID NO: 418, SEQ ID NO: 420, SEQ ID NO: 422, SEQ ID NO: 424, SEQ ID NO: 426, SEQ ID NO: 428, SEQ ID NO: 430, SEQ ID NO: 432, SEQ ID NO: 434 or SEQ ID NO: 440. In one embodiment, the nucleic acid molecule comprises less than 500, 400, 300, 200, 100, 90, 80, 70, 60, 50 or 40 further nucleotides. In a further embodiment, the nucleic acid molecule comprises less than 30, 20 or 10 further nucleotides. In one embodiment, the nucleic acid molecule use in the process of the invention is identical to the sequences shown in SEQ ID NO: 1, SEQ ID NO: 3, SEQ ID NO: 5, SEQ ID NO: 7, SEQ ID NO: 9, SEQ ID NO: 11, SEQ ID NO: 13, SEQ ID NO: 15, SEQ ID NO: 19, SEQ ID NO: 21, SEQ ID NO: 23, SEQ ID NO: 25, SEQ ID NO: 27, SEQ ID NO: 29, SEQ ID NO: 31; SEQ ID NO: 64, SEQ ID NO: 66, SEQ ID NO: 68, SEQ ID NO: 70, SEQ ID NO: 72, SEQ ID NO: 74, SEQ ID NO: 76, SEQ ID NO: 78, SEQ ID NO: 80, SEQ ID NO: 82, SEQ ID NO: 84, SEQ ID NO: 86, SEQ ID NO: 88, SEQ ID NO: 90, SEQ ID NO: 92, SEQ ID NO: 94, SEQ ID NO: 96, SEQ ID NO: 98, SEQ ID NO: 100, SEQ ID NO: 102, SEQ ID NO: 104, SEQ ID NO: 106, SEQ ID NO: 108, SEQ ID NO: 110, SEQ ID NO: 112, SEQ ID NO: 114, SEQ ID NO: 116, SEQ ID NO: 118, SEQ ID NO: 120, SEQ ID NO: 122, SEQ ID NO: 124, SEQ ID NO: 126, SEQ ID NO: 128, SEQ ID NO: 130, SEQ ID NO: 132, SEQ ID NO: 134, SEQ ID NO: 136, SEQ ID NO: 138, SEQ ID NO: 140, SEQ ID NO: , SEQ ID NO: 142, SEQ ID NO: 151, SEQ ID NO: 153, SEQ ID NO: 155, SEQ ID NO: 157, SEQ ID NO: 159, SEQ ID NO: 161, SEQ ID NO: 163, SEQ ID NO: 165, SEQ ID NO: 167, SEQ ID NO: 169, SEQ ID NO: 171, SEQ ID NO: 173, SEQ ID NO: 175, SEQ ID NO: 177, SEQ ID NO: 179, SEQ ID NO: 181, SEQ ID NO: 183, SEQ ID NO: 185, SEQ ID NO: 187, SEQ ID NO: 189, SEQ ID NO: 191, SEQ ID NO: 193, SEQ ID NO: 195, SEQ ID NO: 197, SEQ ID NO: 199, SEQ ID NO: 201, SEQ ID NO: 203, SEQ ID NO: 205, SEQ ID NO: 207, SEQ ID NO: 209, SEQ ID NO: 211, SEQ ID NO: 213, SEQ ID NO: 215, SEQ ID NO: 217, SEQ ID NO: 219, SEQ ID NO: 228, SEQ ID NO: 230, SEQ ID NO: 232, SEQ ID NO: 234, SEQ ID NO: 236, SEQ ID NO: 238, SEQ ID NO: 240, SEQ ID NO: 242, SEQ ID NO: 249, SEQ ID NO: 251, SEQ ID NO: 253, SEQ ID NO: 255, SEQ ID NO: 257, SEQ ID NO: 259, SEQ ID NO: 261, SEQ ID NO: 263, SEQ ID NO: 265, SEQ ID NO: 267, SEQ ID NO: 269, SEQ ID NO: 271, SEQ ID NO: 282, SEQ ID NO: 284, SEQ ID NO: 286, SEQ ID NO: 288, SEQ ID NO: 290, SEQ ID NO: 292, SEQ ID NO: 294, SEQ ID NO: 296, SEQ ID NO: 298, SEQ ID NO: 300, SEQ ID NO: 302, SEQ ID NO: 304, SEQ ID NO: 306, SEQ ID NO: 308, SEQ ID NO: 310, SEQ ID NO: 312, SEQ ID NO: 314, SEQ ID NO: 316, SEQ ID NO: 318, SEQ ID NO: 320, SEQ ID NO: 322, SEQ ID NO: 324, SEQ ID NO: 326, SEQ ID NO: 328, SEQ ID NO: 330, SEQ ID NO: 332, SEQ ID NO: 334, SEQ ID NO: 336, SEQ ID NO: 338, SEQ ID NO: 340, SEQ ID NO: 342, SEQ ID NO: 344, SEQ ID NO: 346, SEQ ID NO: 348, SEQ ID NO: 350, SEQ ID NO: 352, SEQ ID NO: 354, SEQ ID NO: 356, SEQ ID NO: 358, SEQ ID NO: 360, SEQ ID NO: 362, SEQ ID NO: 364, SEQ ID NO: 366, SEQ ID NO: 368, SEQ ID NO: 370, SEQ ID NO: 372, SEQ ID NO: 374, SEQ ID NO: 376, SEQ ID NO: 378, SEQ ID NO: 380, SEQ ID NO: 382, SEQ ID NO: 384, SEQ ID NO: 386, SEQ ID NO: 388, SEQ ID NO: 390, SEQ ID NO: 392, SEQ ID NO: 394, SEQ ID NO: 396, SEQ ID NO: 398, SEQ ID NO: 400, SEQ ID NO: 402, SEQ ID NO: 404, SEQ ID NO: 406, SEQ ID NO: 408, SEQ ID NO: 410, SEQ ID NO: 412, SEQ ID NO: 414, SEQ ID NO: 416, SEQ ID NO: 418, SEQ ID NO: 420, SEQ ID NO: 422, SEQ ID NO: 424, SEQ ID NO: 426, SEQ ID NO: 428, SEQ ID NO: 430, SEQ ID NO: 432, SEQ ID NO: 434 or SEQ ID NO: 440.

[0310] Also preferred is that the nucleic acid molecule of the invention encodes a polypeptide comprising the sequence shown in SEQ ID NO: 2, SEQ ID NO: 4, SEQ ID NO: 6, SEQ ID NO: 8, SEQ ID NO: 10, SEQ ID NO: 12, SEQ ID NO: 14, SEQ ID NO: 16, SEQ ID NO: 20, SEQ ID NO: 22, SEQ ID NO: 24, SEQ ID NO: 26, SEQ ID NO: 28, SEQ ID NO. 30, SEQ ID NO: 32; SEQ ID NO: 65, SEQ ID NO: 67, SEQ ID NO: 69, SEQ ID NO: 71, SEQ ID NO: 73, SEQ ID NO: 75, SEQ ID NO: 77, SEQ ID NO: 79, SEQ ID NO: 81, SEQ ID NO: 83, SEQ ID NO: 85, SEQ ID NO: 87, SEQ ID NO: 89, SEQ ID NO: 91, SEQ ID NO: 93, SEQ ID NO: 95, SEQ ID NO: 97, SEQ ID NO: 99, SEQ ID NO: 101, SEQ ID NO: 103, SEQ ID NO: 105, SEQ ID NO: 107, SEQ ID NO: 109, SEQ ID NO: 111, SEQ ID NO: 113, SEQ ID NO: 115, SEQ ID NO: 117, SEQ ID NO: 119, SEQ ID NO: 121, SEQ ID NO: 123, SEQ ID NO: 125, SEQ ID NO: 127, SEQ ID NO: 129, SEQ ID NO: 131, SEQ ID NO: 133, SEQ ID NO: 135, SEQ ID NO: 137, SEQ ID NO: 139, SEQ ID NO: 141, SEQ ID NO: 143, SEQ ID NO: 152, SEQ ID NO: 154, SEQ ID NO: 156, SEQ ID NO: 158, SEQ ID NO: 160, SEQ ID NO: 162, SEQ ID NO: 164, SEQ ID NO: 166, SEQ ID NO: 168, SEQ ID NO: 170, SEQ ID NO: 172, SEQ ID NO: 174, SEQ ID NO: 176, SEQ ID NO: 178, SEQ ID NO: 180, SEQ ID NO: 182, SEQ ID NO: 184, SEQ ID NO: 186, SEQ ID NO: 188, SEQ ID NO: 190, SEQ ID NO: 192, SEQ ID NO: 194, SEQ ID NO: 196, SEQ ID NO: 198, SEQ ID NO: 200, SEQ ID NO: 202, SEQ ID NO: 204, SEQ ID NO: 206, SEQ ID NO: 208, SEQ ID NO: 210, SEQ ID NO: 212, SEQ ID NO: 214, SEQ ID NO: 216, SEQ ID NO: 218, SEQ ID NO: 220, SEQ ID NO: 229, SEQ ID NO:231, SEQ ID NO:233, SEQ ID NO: 235, SEQ ID NO: 237, SEQ ID NO: 239, SEQ ID NO: 241, SEQ ID NO: 243, SEQ ID NO: 250, SEQ ID NO: 252, SEQ ID NO: 254, SEQ ID NO: 256, SEQ ID NO: 258, SEQ ID NO: 260, SEQ ID NO: 262, SEQ ID NO: 264, SEQ ID NO: 266, SEQ ID NO: 268, SEQ ID NO: 270, SEQ ID NO: 272, SEQ ID NO: 283, SEQ ID NO: 285, SEQ ID NO: 287, SEQ ID NO: 289, SEQ ID NO: 291, SEQ ID NO: 293, SEQ ID NO: 295, SEQ ID NO: 297, SEQ ID NO: 299, SEQ ID NO: 301, SEQ ID NO: 303, SEQ ID NO: 305, SEQ ID NO: 307, SEQ ID NO: 309, SEQ ID NO: 311, SEQ ID NO: 313, SEQ ID NO: 315, SEQ ID NO: 317, SEQ ID NO: 319, SEQ ID NO: 321, SEQ ID NO: 323, SEQ ID NO: 325, SEQ ID NO: 327, SEQ ID NO: 329, SEQ ID NO: 331, SEQ ID NO: 333, SEQ ID NO: 335, SEQ ID NO: 337, SEQ ID NO: 339, SEQ ID NO: 341, SEQ ID NO: 343, SEQ ID NO: 345, SEQ ID NO: 347, SEQ ID NO: 349, SEQ ID NO: 351, SEQ ID NO: 353, SEQ ID NO: 355, SEQ ID NO: 357, SEQ ID NO: 359, SEQ ID NO: 361, SEQ ID NO: 363, SEQ ID NO: 365, SEQ ID NO: 367, SEQ ID NO: 369, SEQ ID NO: 371, SEQ ID NO: 373, SEQ ID NO: 375, SEQ ID NO: 377, SEQ ID NO: 379, SEQ ID NO: 381, SEQ ID NO: 383, SEQ ID NO: 385, SEQ ID NO: 387, SEQ ID NO: 389, SEQ ID NO: 391, SEQ ID NO: 393, SEQ ID NO: 395, SEQ ID NO: 397, SEQ ID NO: 399, SEQ ID NO: 401, SEQ ID NO: 403, SEQ ID NO: 405, SEQ ID NO: 407, SEQ ID NO: 409, SEQ ID NO: 411, SEQ ID NO: 413, SEQ ID NO: 415, SEQ ID NO: 417, SEQ ID NO: 419, SEQ ID NO: 421, SEQ ID NO: 423, SEQ ID NO: 425, SEQ ID NO: 427, SEQ ID NO: 429, SEQ ID NO: 431, SEQ ID NO: 433, SEQ ID NO: 435 or SEQ ID NO: 441. In one embodiment, the nucleic acid molecule encodes less than 150, 130, 100, 80, 60, 50, 40 or 30 further amino acids. In a further embodiment, the encoded polypeptide comprises less than 20, 15, 10, 9, 8, 7, 6 or 5 further amino acids. In one embodiment used in the inventive process, the encoded polynucleotide is identical to the sequences shown in SEQ ID NO: 2, SEQ ID NO: 4, SEQ ID NO: 6, SEQ ID NO: 8, SEQ ID NO: 10, SEQ ID NO: 12, SEQ ID NO: 14, SEQ ID NO: 16, SEQ ID NO: 20, SEQ ID NO: 22, SEQ ID NO: 24, SEQ ID NO: 26, SEQ ID NO: 28, SEQ ID NO. 30, SEQ ID NO: 32; SEQ ID NO: 65, SEQ ID NO: 67, SEQ ID NO: 69, SEQ ID NO: 71, SEQ ID NO: 73, SEQ ID NO: 75, SEQ ID NO: 77, SEQ ID NO: 79, SEQ ID NO: 81, SEQ ID NO: 83, SEQ ID NO: 85, SEQ ID NO: 87, SEQ ID NO: 89, SEQ ID NO: 91, SEQ ID NO: 93, SEQ ID NO: 95, SEQ ID NO: 97, SEQ ID NO: 99, SEQ ID NO: 101, SEQ ID NO: 103, SEQ ID NO: 105, SEQ ID NO: 107, SEQ ID NO: 109, SEQ ID NO: 111, SEQ ID NO: 113, SEQ ID NO: 115, SEQ ID NO: 117, SEQ ID NO: 119, SEQ ID NO: 121, SEQ ID NO: 123, SEQ ID NO: 125, SEQ ID NO: 127, SEQ ID NO: 129, SEQ ID NO: 131, SEQ ID NO: 133, SEQ ID NO: 135, SEQ ID NO: 137, SEQ ID NO: 139, SEQ ID NO: 141, SEQ ID NO: 143, SEQ ID NO: 152, SEQ ID NO: 154, SEQ ID NO: 156, SEQ ID NO: 158, SEQ ID NO: 160, SEQ ID NO: 162, SEQ ID NO: 164, SEQ ID NO: 166, SEQ ID NO: 168, SEQ ID NO: 170, SEQ ID NO: 172, SEQ ID NO: 174, SEQ ID NO: 176, SEQ ID NO: 178, SEQ ID NO: 180, SEQ ID NO: 182, SEQ ID NO: 184, SEQ ID NO: 186, SEQ ID NO: 188, SEQ ID NO: 190, SEQ ID NO: 192, SEQ ID NO: 194, SEQ ID NO: 196, SEQ ID NO: 198, SEQ ID NO: 200, SEQ ID NO: 202, SEQ ID NO: 204, SEQ ID NO: 206, SEQ ID NO: 208, SEQ ID NO: 210, SEQ ID NO: 212, SEQ ID NO: 214, SEQ ID NO: 216, SEQ ID NO: 218, SEQ ID NO: 220, SEQ ID NO: 229, SEQ ID NO:231, SEQ ID NO:233, SEQ ID NO: 235, SEQ ID NO: 237, SEQ ID NO: 239, SEQ ID NO: 241, SEQ ID NO: 243, SEQ ID NO: 250, SEQ ID NO: 252, SEQ ID NO: 254, SEQ ID NO: 256, SEQ ID NO: 258, SEQ ID NO: 260, SEQ ID NO: 262, SEQ ID NO: 264, SEQ ID NO: 266, SEQ ID NO: 268, SEQ ID NO: 270, SEQ ID NO: 272, SEQ ID NO: 283, SEQ ID NO: 285, SEQ ID NO: 287, SEQ ID NO: 289, SEQ ID NO: 291, SEQ ID NO: 293, SEQ ID NO: 295, SEQ ID NO: 297, SEQ ID NO: 299, SEQ ID NO: 301, SEQ ID NO: 303, SEQ ID NO: 305, SEQ ID NO: 307, SEQ ID NO: 309, SEQ ID NO: 311, SEQ ID NO: 313, SEQ ID NO: 315, SEQ ID NO: 317, SEQ ID NO: 319, SEQ ID NO: 321, SEQ ID NO: 323, SEQ ID NO: 325, SEQ ID NO: 327, SEQ ID NO: 329, SEQ ID NO: 331, SEQ ID NO: 333, SEQ ID NO: 335, SEQ ID NO: 337, SEQ ID NO: 339, SEQ ID NO: 341, SEQ ID NO: 343, SEQ ID NO: 345, SEQ ID NO: 347, SEQ ID NO: 349, SEQ ID NO: 351, SEQ ID NO: 353, SEQ ID NO: 355, SEQ ID NO: 357, SEQ ID NO: 359, SEQ ID NO: 361, SEQ ID NO: 363, SEQ ID NO: 365, SEQ ID NO: 367, SEQ ID NO: 369, SEQ ID NO: 371, SEQ ID NO: 373, SEQ ID NO: 375, SEQ ID NO: 377, SEQ ID NO: 379, SEQ ID NO: 381, SEQ ID NO: 383, SEQ ID NO: 385, SEQ ID NO: 387, SEQ ID NO: 389, SEQ ID NO: 391, SEQ ID NO: 393, SEQ ID NO: 395, SEQ ID NO: 397, SEQ ID NO: 399, SEQ ID NO: 401, SEQ ID NO: 403, SEQ ID NO: 405, SEQ ID NO: 407, SEQ ID NO: 409, SEQ ID NO: 411, SEQ ID NO: 413, SEQ ID NO: 415, SEQ ID NO: 417, SEQ ID NO: 419, SEQ ID NO: 421, SEQ ID NO: 423, SEQ ID NO: 425, SEQ ID NO: 427, SEQ ID NO: 429, SEQ ID NO: 431, SEQ ID NO: 433, SEQ ID NO: 435 or SEQ ID NO: 441.

[0311] In one embodiment, the nucleic acid molecule encoding a polypeptide comprising the sequence shown in SEQ ID NO: 2, SEQ ID NO: 4, SEQ ID NO: 6, SEQ ID NO: 8, SEQ ID NO: 10, SEQ ID NO: 12, SEQ ID NO: 14, SEQ ID NO: 16, SEQ ID NO: 20, SEQ ID NO: 22, SEQ ID NO: 24, SEQ ID NO: 26, SEQ ID NO: 28, SEQ ID NO. 30, SEQ ID NO: 32; SEQ ID NO: 65, SEQ ID NO: 67, SEQ ID NO: 69, SEQ ID NO: 71, SEQ ID NO: 73, SEQ ID NO: 75, SEQ ID NO: 77, SEQ ID NO: 79, SEQ ID NO: 81, SEQ ID NO: 83, SEQ ID NO: 85, SEQ ID NO: 87, SEQ ID NO: 89, SEQ ID NO: 91, SEQ ID NO: 93, SEQ ID NO: 95, SEQ ID NO: 97, SEQ ID NO: 99, SEQ ID NO: 101, SEQ ID NO: 103, SEQ ID NO: 105, SEQ ID NO: 107, SEQ ID NO: 109, SEQ ID NO: 111, SEQ ID NO: 113, SEQ ID NO: 115, SEQ ID NO: 117, SEQ ID NO: 119, SEQ ID NO: 121, SEQ ID NO: 123, SEQ ID NO: 125, SEQ ID NO: 127, SEQ ID NO: 129, SEQ ID NO: 131, SEQ ID NO: 133, SEQ ID NO: 135, SEQ ID NO: 137, SEQ ID NO: 139, SEQ ID NO: 141, SEQ ID NO: 143, SEQ ID NO: 152, SEQ ID NO: 154, SEQ ID NO: 156, SEQ ID NO: 158, SEQ ID NO: 160, SEQ ID NO: 162, SEQ ID NO: 164, SEQ ID NO: 166, SEQ ID NO: 168, SEQ ID NO: 170, SEQ ID NO: 172, SEQ ID NO: 174, SEQ ID NO: 176, SEQ ID NO: 178, SEQ ID NO: 180, SEQ ID NO: 182, SEQ ID NO: 184, SEQ ID NO: 186, SEQ ID NO: 188, SEQ ID NO: 190, SEQ ID NO: 192, SEQ ID NO: 194, SEQ ID NO: 196, SEQ ID NO: 198, SEQ ID NO: 200, SEQ ID NO: 202, SEQ ID NO: 204, SEQ ID NO: 206, SEQ ID NO: 208, SEQ ID NO: 210, SEQ ID NO: 212, SEQ ID NO: 214, SEQ ID NO: 216, SEQ ID NO: 218, SEQ ID NO: 220, SEQ ID NO: 229, SEQ ID NO:231, SEQ ID NO:233, SEQ ID NO: 235, SEQ ID NO: 237, SEQ ID NO: 239, SEQ ID NO: 241, SEQ ID NO: 243, SEQ ID NO: 250, SEQ ID NO: 252, SEQ ID NO: 254, SEQ ID NO: 256, SEQ ID NO: 258, SEQ ID NO: 260, SEQ ID NO: 262, SEQ ID NO: 264, SEQ ID NO: 266, SEQ ID NO: 268, SEQ ID NO: 270, SEQ ID NO: 272, SEQ ID NO: 283, SEQ ID NO: 285, SEQ ID NO: 287, SEQ ID NO: 289, SEQ ID NO: 291, SEQ ID NO: 293, SEQ ID NO: 295, SEQ ID NO: 297, SEQ ID NO: 299, SEQ ID NO: 301, SEQ ID NO: 303, SEQ ID NO: 305, SEQ ID NO: 307, SEQ ID NO: 309, SEQ ID NO: 311, SEQ ID NO: 313, SEQ ID NO: 315, SEQ ID NO: 317, SEQ ID NO: 319, SEQ ID NO: 321, SEQ ID NO: 323, SEQ ID NO: 325, SEQ ID NO: 327, SEQ ID NO: 329, SEQ ID NO: 331, SEQ ID NO: 333, SEQ ID NO: 335, SEQ ID NO: 337, SEQ ID NO: 339, SEQ ID NO: 341, SEQ ID NO: 343, SEQ ID NO: 345, SEQ ID NO: 347, SEQ ID NO: 349, SEQ ID NO: 351, SEQ ID NO: 353, SEQ ID NO: 355, SEQ ID NO: 357, SEQ ID NO: 359, SEQ ID NO: 361, SEQ ID NO: 363, SEQ ID NO: 365, SEQ ID NO: 367, SEQ ID NO: 369, SEQ ID NO: 371, SEQ ID NO: 373, SEQ ID NO: 375, SEQ ID NO: 377, SEQ ID NO: 379, SEQ ID NO: 381, SEQ ID NO: 383, SEQ ID NO: 385, SEQ ID NO: 387, SEQ ID NO: 389, SEQ ID NO: 391, SEQ ID NO: 393, SEQ ID NO: 395, SEQ ID NO: 397, SEQ ID NO: 399, SEQ ID NO: 401, SEQ ID NO: 403, SEQ ID NO: 405, SEQ ID NO: 407, SEQ ID NO: 409, SEQ ID NO: 411, SEQ ID NO: 413, SEQ ID NO: 415, SEQ ID NO: 417, SEQ ID NO: 419, SEQ ID NO: 421, SEQ ID NO: 423, SEQ ID NO: 425, SEQ ID NO: 427, SEQ ID NO: 429, SEQ ID NO: 431, SEQ ID NO: 433, SEQ ID NO: 435 or SEQ ID NO: 441 comprises less than 100 further nucleotides. In a further embodiment, the nucleic acid molecule comprises less than 30 further nucleotides. In one embodiment, the nucleic acid molecule is identical to a coding sequence of the sequences shown in SEQ ID NO: 2, SEQ ID NO: 4, SEQ ID NO: 6, SEQ ID NO: 8, SEQ ID NO: 10, SEQ ID NO: 12, SEQ ID NO: 14, SEQ ID NO: 16, SEQ ID NO: 20, SEQ ID NO: 22, SEQ ID NO: 24, SEQ ID NO: 26, SEQ ID NO: 28, SEQ ID NO. 30, SEQ ID NO: 32; SEQ ID NO: 65, SEQ ID NO: 67, SEQ ID NO: 69, SEQ ID NO: 71, SEQ ID NO: 73, SEQ ID NO: 75, SEQ ID NO: 77, SEQ ID NO: 79, SEQ ID NO: 81, SEQ ID NO: 83, SEQ ID NO: 85, SEQ ID NO: 87, SEQ ID NO: 89, SEQ ID NO: 91, SEQ ID NO: 93, SEQ ID NO: 95, SEQ ID NO: 97, SEQ ID NO: 99, SEQ ID NO: 101, SEQ ID NO: 103, SEQ ID NO: 105, SEQ ID NO: 107, SEQ ID NO: 109, SEQ ID NO: 111, SEQ ID NO: 113, SEQ ID NO: 115, SEQ ID NO: 117, SEQ ID NO: 119, SEQ ID NO: 121, SEQ ID NO: 123, SEQ ID NO: 125, SEQ ID NO: 127, SEQ ID NO: 129, SEQ ID NO: 131, SEQ ID NO: 133, SEQ ID NO: 135, SEQ ID NO: 137, SEQ ID NO: 139, SEQ ID NO: 141, SEQ ID NO: 143, SEQ ID NO: 152, SEQ ID NO: 154, SEQ ID NO: 156, SEQ ID NO: 158, SEQ ID NO: 160, SEQ ID NO: 162, SEQ ID NO: 164, SEQ ID NO: 166, SEQ ID NO: 168, SEQ ID NO: 170, SEQ ID NO: 172, SEQ ID NO: 174, SEQ ID NO: 176, SEQ ID NO: 178, SEQ ID NO: 180, SEQ ID NO: 182, SEQ ID NO: 184, SEQ ID NO: 186, SEQ ID NO: 188, SEQ ID NO: 190, SEQ ID NO: 192, SEQ ID NO: 194, SEQ ID NO: 196, SEQ ID NO: 198, SEQ ID NO: 200, SEQ ID NO: 202, SEQ ID NO: 204, SEQ ID NO: 206, SEQ ID NO: 208, SEQ ID NO: 210, SEQ ID NO: 212, SEQ ID NO: 214, SEQ ID NO: 216, SEQ ID NO: 218, SEQ ID NO: 220, SEQ ID NO: 229, SEQ ID NO:231, SEQ ID NO:233, SEQ ID NO: 235, SEQ ID NO: 237, SEQ ID NO: 239, SEQ ID NO: 241, SEQ ID NO: 243, SEQ ID NO: 250, SEQ ID NO: 252, SEQ ID NO: 254, SEQ ID NO: 256, SEQ ID NO: 258, SEQ ID NO: 260, SEQ ID NO: 262, SEQ ID NO: 264, SEQ ID NO: 266, SEQ ID NO: 268, SEQ ID NO: 270, SEQ ID NO: 272, SEQ ID NO: 283, SEQ ID NO: 285, SEQ ID NO: 287, SEQ ID NO: 289, SEQ ID NO: 291, SEQ ID NO: 293, SEQ ID NO: 295, SEQ ID NO: 297, SEQ ID NO: 299, SEQ ID NO: 301, SEQ ID NO: 303, SEQ ID NO: 305, SEQ ID NO: 307, SEQ ID NO: 309, SEQ ID NO: 311, SEQ ID NO: 313, SEQ ID NO: 315, SEQ ID NO: 317, SEQ ID NO: 319, SEQ ID NO: 321, SEQ ID NO: 323, SEQ ID NO: 325, SEQ ID NO: 327, SEQ ID NO: 329, SEQ ID NO: 331, SEQ ID NO: 333, SEQ ID NO: 335, SEQ ID NO: 337, SEQ ID NO: 339, SEQ ID NO: 341, SEQ ID NO: 343, SEQ ID NO: 345, SEQ ID NO: 347, SEQ ID NO: 349, SEQ ID NO: 351, SEQ ID NO: 353, SEQ ID NO: 355, SEQ ID NO: 357, SEQ ID NO: 359, SEQ ID NO: 361, SEQ ID NO: 363, SEQ ID NO: 365, SEQ ID NO: 367, SEQ ID NO: 369, SEQ ID NO: 371, SEQ ID NO: 373, SEQ ID NO: 375, SEQ ID NO: 377, SEQ ID NO: 379, SEQ ID NO: 381, SEQ ID NO: 383, SEQ ID NO: 385, SEQ ID NO: 387, SEQ ID NO: 389, SEQ ID NO: 391, SEQ ID NO: 393, SEQ ID NO: 395, SEQ ID NO: 397, SEQ ID NO: 399, SEQ ID NO: 401, SEQ ID NO: 403, SEQ ID NO: 405, SEQ ID NO: 407, SEQ ID NO: 409, SEQ ID NO: 411, SEQ ID NO: 413, SEQ ID NO: 415, SEQ ID NO: 417, SEQ ID NO: 419, SEQ ID NO: 421, SEQ ID NO: 423, SEQ ID NO: 425, SEQ ID NO: 427, SEQ ID NO: 429, SEQ ID NO: 431, SEQ ID NO: 433, SEQ ID NO: 435 or SEQ ID NO: 441.

[0312] Polypeptides (=proteins), which still have the abovementioned activity of the polypeptide of the present invention, e.g. conferring an increase of the fine chemical or having the biological activity of the protein of the invention, i.e. polypeptides whose activity is essentially reduced, are polypeptides by at least 10% or 20%, by preference 30% or 40%, especially preferably 50% or 60%, very especially preferably 80% or 90% or more in comparison to the wild type biological activity or enzyme activity, advantageously, the activity is essentially reduced in comparison with the activity of a protein encoded by SEQ ID NO: 2, SEQ ID NO: 4, SEQ ID NO: 6, SEQ ID NO: 8, SEQ ID NO: 10, SEQ ID NO: 12, SEQ ID NO: 14, SEQ ID NO: 16, SEQ ID NO: 20 SEQ ID NO: 22, SEQ ID NO: 24, SEQ ID NO: 26, SEQ ID NO: 28, SEQ ID NO. 30, SEQ ID NO: 32; SEQ ID NO: 65, SEQ ID NO: 67, SEQ ID NO: 69, SEQ ID NO: 71, SEQ ID NO: 73, SEQ ID NO: 75, SEQ ID NO: 77, SEQ ID NO: 79, SEQ ID NO: 81, SEQ ID NO: 83, SEQ ID NO: 85, SEQ ID NO: 87, SEQ ID NO: 89, SEQ ID NO: 91, SEQ ID NO: 93, SEQ ID NO: 95, SEQ ID NO: 97, SEQ ID NO: 99, SEQ ID NO: 101, SEQ ID NO: 103, SEQ ID NO: 105, SEQ ID NO: 107, SEQ ID NO: 109, SEQ ID NO: 111, SEQ ID NO: 113, SEQ ID NO: 115, SEQ ID NO: 117, SEQ ID NO: 119, SEQ ID NO: 121, SEQ ID NO: 123, SEQ ID NO: 125, SEQ ID NO: 127, SEQ ID NO: 129, SEQ ID NO: 131, SEQ ID NO: 133, SEQ ID NO: 135, SEQ ID NO: 137, SEQ ID NO: 139, SEQ ID NO: 141, SEQ ID NO: 143, SEQ ID NO: 152, SEQ ID NO: 154, SEQ ID NO: 156, SEQ ID NO: 158, SEQ ID NO: 160, SEQ ID NO: 162, SEQ ID NO: 164, SEQ ID NO: 166, SEQ ID NO: 168, SEQ ID NO: 170, SEQ ID NO: 172, SEQ ID NO: 174, SEQ ID NO: 176, SEQ ID NO: 178, SEQ ID NO: 180, SEQ ID NO: 182, SEQ ID NO: 184, SEQ ID NO: 186, SEQ ID NO: 188, SEQ ID NO: 190, SEQ ID NO: 192, SEQ ID NO: 194, SEQ ID NO: 196, SEQ ID NO: 198, SEQ ID NO: 200, SEQ ID NO: 202, SEQ ID NO: 204, SEQ ID NO: 206, SEQ ID NO: 208, SEQ ID NO: 210, SEQ ID NO: 212, SEQ ID NO: 214, SEQ ID NO: 216, SEQ ID NO: 218, SEQ ID NO: 220, SEQ ID NO: 229, SEQ ID NO:231, SEQ ID NO:233, SEQ ID NO: 235, SEQ ID NO: 237, SEQ ID NO: 239, SEQ ID NO: 241, SEQ ID NO: 243, SEQ ID NO: 250, SEQ ID NO: 252, SEQ ID NO: 254, SEQ ID NO: 256, SEQ ID NO: 258, SEQ ID NO: 260, SEQ ID NO: 262, SEQ ID NO: 264, SEQ ID NO: 266, SEQ ID NO: 268, SEQ ID NO: 270, SEQ ID NO: 272, SEQ ID NO: 283, SEQ ID NO: 285, SEQ ID NO: 287, SEQ ID NO: 289, SEQ ID NO: 291, SEQ ID NO: 293, SEQ ID NO: 295, SEQ ID NO: 297, SEQ ID NO: 299, SEQ ID NO: 301, SEQ ID NO: 303, SEQ ID NO: 305, SEQ ID NO: 307, SEQ ID NO: 309, SEQ ID NO: 311, SEQ ID NO: 313, SEQ ID NO: 315, SEQ ID NO: 317, SEQ ID NO: 319, SEQ ID NO: 321, SEQ ID NO: 323, SEQ ID NO: 325, SEQ ID NO: 327, SEQ ID NO: 329, SEQ ID NO: 331, SEQ ID NO: 333, SEQ ID NO: 335, SEQ ID NO: 337, SEQ ID NO: 339, SEQ ID NO: 341, SEQ ID NO: 343, SEQ ID NO: 345, SEQ ID NO: 347, SEQ ID NO: 349, SEQ ID NO: 351, SEQ ID NO: 353, SEQ ID NO: 355, SEQ ID NO: 357, SEQ ID NO: 359, SEQ ID NO: 361, SEQ ID NO: 363, SEQ ID NO: 365, SEQ ID NO: 367, SEQ ID NO: 369, SEQ ID NO: 371, SEQ ID NO: 373, SEQ ID NO: 375, SEQ ID NO: 377, SEQ ID NO: 379, SEQ ID NO: 381, SEQ ID NO: 383, SEQ ID NO: 385, SEQ ID NO: 387, SEQ ID NO: 389, SEQ ID NO: 391, SEQ ID NO: 393, SEQ ID NO: 395, SEQ ID NO: 397, SEQ ID NO: 399, SEQ ID NO: 401, SEQ ID NO: 403, SEQ ID NO: 405, SEQ ID NO: 407, SEQ ID NO: 409, SEQ ID NO: 411, SEQ ID NO: 413, SEQ ID NO: 415, SEQ ID NO: 417, SEQ ID NO: 419, SEQ ID NO: 421, SEQ ID NO: 423, SEQ ID NO: 425, SEQ ID NO: 427, SEQ ID NO: 429, SEQ ID NO: 431, SEQ ID NO: 433, SEQ ID NO: 435 or SEQ ID NO: 441 and expressed under identical conditions.

[0313] Homologues of SEQ ID NO: 1, SEQ ID NO: 3, SEQ ID NO: 5, SEQ ID NO: 7, SEQ ID NO: 9, SEQ ID NO: 11, SEQ ID NO: 13, SEQ ID NO: 15, SEQ ID NO: 19, SEQ ID NO: 21, SEQ ID NO: 23, SEQ ID NO: 25, SEQ ID NO: 27, SEQ ID NO: 29, SEQ ID NO: 31; SEQ ID NO: 64, SEQ ID NO: 66, SEQ ID NO: 68, SEQ ID NO: 70, SEQ ID NO: 72, SEQ ID NO: 74, SEQ ID NO: 76, SEQ ID NO: 78, SEQ ID NO: 80, SEQ ID NO: 82, SEQ ID NO: 84, SEQ ID NO: 86, SEQ ID NO: 88, SEQ ID NO: 90, SEQ ID NO: 92, SEQ ID NO: 94, SEQ ID NO: 96, SEQ ID NO: 98, SEQ ID NO: 100, SEQ ID NO: 102, SEQ ID NO: 104, SEQ ID NO: 106, SEQ ID NO: 108, SEQ ID NO: 110, SEQ ID NO: 112, SEQ ID NO: 114, SEQ ID NO: 116, SEQ ID NO: 118, SEQ ID NO: 120, SEQ ID NO: 122, SEQ ID NO: 124, SEQ ID NO: 126, SEQ ID NO: 128, SEQ ID NO: 130, SEQ ID NO: 132, SEQ ID NO: 134, SEQ ID NO: 136, SEQ ID NO: 138, SEQ ID NO: 140, SEQ ID NO: , SEQ ID NO: 142, SEQ ID NO: 151, SEQ ID NO: 153, SEQ ID NO: 155, SEQ ID NO: 157, SEQ ID NO: 159, SEQ ID NO: 161, SEQ ID NO: 163, SEQ ID NO: 165, SEQ ID NO: 167, SEQ ID NO: 169, SEQ ID NO: 171, SEQ ID NO: 173, SEQ ID NO: 175, SEQ ID NO: 177, SEQ ID NO: 179, SEQ ID NO: 181, SEQ ID NO: 183, SEQ ID NO: 185, SEQ ID NO: 187, SEQ ID NO: 189, SEQ ID NO: 191, SEQ ID NO: 193, SEQ ID NO: 195, SEQ ID NO: 197, SEQ ID NO: 199, SEQ ID NO: 201, SEQ ID NO: 203, SEQ ID NO: 205, SEQ ID NO: 207, SEQ ID NO: 209, SEQ ID NO: 211, SEQ ID NO: 213, SEQ ID NO: 215, SEQ ID NO: 217, SEQ ID NO: 219, SEQ ID NO: 228, SEQ ID NO: 230, SEQ ID NO: 232, SEQ ID NO: 234, SEQ ID NO: 236, SEQ ID NO: 238, SEQ ID NO: 240, SEQ ID NO: 242, SEQ ID NO: 249, SEQ ID NO: 251, SEQ ID NO: 253, SEQ ID NO: 255, SEQ ID NO: 257, SEQ ID NO: 259, SEQ ID NO: 261, SEQ ID NO: 263, SEQ ID NO: 265, SEQ ID NO: 267, SEQ ID NO: 269, SEQ ID NO: 271, SEQ ID NO: 282, SEQ ID NO: 284, SEQ ID NO: 286, SEQ ID NO: 288, SEQ ID NO: 290, SEQ ID NO: 292, SEQ ID NO: 294, SEQ ID NO: 296, SEQ ID NO: 298, SEQ ID NO: 300, SEQ ID NO: 302, SEQ ID NO: 304, SEQ ID NO: 306, SEQ ID NO: 308, SEQ ID NO: 310, SEQ ID NO: 312, SEQ ID NO: 314, SEQ ID NO: 316, SEQ ID NO: 318, SEQ ID NO: 320, SEQ ID NO: 322, SEQ ID NO: 324, SEQ ID NO: 326, SEQ ID NO: 328, SEQ ID NO: 330, SEQ ID NO: 332, SEQ ID NO: 334, SEQ ID NO: 336, SEQ ID NO: 338, SEQ ID NO: 340, SEQ ID NO: 342, SEQ ID NO: 344, SEQ ID NO: 346, SEQ ID NO: 348, SEQ ID NO: 350, SEQ ID NO: 352, SEQ ID NO: 354, SEQ ID NO: 356, SEQ ID NO: 358, SEQ ID NO: 360, SEQ ID NO: 362, SEQ ID NO: 364, SEQ ID NO: 366, SEQ ID NO: 368, SEQ ID NO: 370, SEQ ID NO: 372, SEQ ID NO: 374, SEQ ID NO: 376, SEQ ID NO: 378, SEQ ID NO: 380, SEQ ID NO: 382, SEQ ID NO: 384, SEQ ID NO: 386, SEQ ID NO: 388, SEQ ID NO: 390, SEQ ID NO: 392, SEQ ID NO: 394, SEQ ID NO: 396, SEQ ID NO: 398, SEQ ID NO: 400, SEQ ID NO: 402, SEQ ID NO: 404, SEQ ID NO: 406, SEQ ID NO: 408, SEQ ID NO: 410, SEQ ID NO: 412, SEQ ID NO: 414, SEQ ID NO: 416, SEQ ID NO: 418, SEQ ID NO: 420, SEQ ID NO: 422, SEQ ID NO: 424, SEQ ID NO: 426, SEQ ID NO: 428, SEQ ID NO: 430, SEQ ID NO: 432, SEQ ID NO: 434 or SEQ ID NO: 440 or of the derived sequences of SEQ ID NO: 2, SEQ ID NO: 4, SEQ ID NO: 6, SEQ ID NO: 8, SEQ ID NO: 10, SEQ ID NO: 12, SEQ ID NO: 14, SEQ ID NO: 16, SEQ ID NO: 20, SEQ ID NO: 22, SEQ ID NO: 24, SEQ ID NO: 26, SEQ ID NO: 28, SEQ ID NO. 30, SEQ ID NO: 32; SEQ ID NO: 65, SEQ ID NO: 67, SEQ ID NO: 69, SEQ ID NO: 71, SEQ ID NO: 73, SEQ ID NO: 75, SEQ ID NO: 77, SEQ ID NO: 79, SEQ ID NO: 81, SEQ ID NO: 83, SEQ ID NO: 85, SEQ ID NO: 87, SEQ ID NO: 89, SEQ ID NO: 91, SEQ ID NO: 93, SEQ ID NO: 95, SEQ ID NO: 97, SEQ ID NO: 99, SEQ ID NO: 101, SEQ ID NO: 103, SEQ ID NO: 105, SEQ ID NO: 107, SEQ ID NO: 109, SEQ ID NO: 111, SEQ ID NO: 113, SEQ ID NO: 115, SEQ ID NO: 117, SEQ ID NO: 119, SEQ ID NO: 121, SEQ ID NO: 123, SEQ ID NO: 125, SEQ ID NO: 127, SEQ ID NO: 129, SEQ ID NO: 131, SEQ ID NO: 133, SEQ ID NO: 135, SEQ ID NO: 137, SEQ ID NO: 139, SEQ ID NO: 141, SEQ ID NO: 143, SEQ ID NO: 152, SEQ ID NO: 154, SEQ ID NO: 156, SEQ ID NO: 158, SEQ ID NO: 160, SEQ ID NO: 162, SEQ ID NO: 164, SEQ ID NO: 166, SEQ ID NO: 168, SEQ ID NO: 170, SEQ ID NO: 172, SEQ ID NO: 174, SEQ ID NO: 176, SEQ ID NO: 178, SEQ ID NO: 180, SEQ ID NO: 182, SEQ ID NO: 184, SEQ ID NO: 186, SEQ ID NO: 188, SEQ ID NO: 190, SEQ ID NO: 192, SEQ ID NO: 194, SEQ ID NO: 196, SEQ ID NO: 198, SEQ ID NO: 200, SEQ ID NO: 202, SEQ ID NO: 204, SEQ ID NO: 206, SEQ ID NO: 208, SEQ ID NO: 210, SEQ ID NO: 212, SEQ ID NO: 214, SEQ ID NO: 216, SEQ ID NO: 218, SEQ ID NO: 220, SEQ ID NO: 229, SEQ ID NO:231, SEQ ID NO:233, SEQ ID NO: 235, SEQ ID NO: 237, SEQ ID NO: 239, SEQ ID NO: 241, SEQ ID NO: 243, SEQ ID NO: 250, SEQ ID NO: 252, SEQ ID NO: 254, SEQ ID NO: 256, SEQ ID NO: 258, SEQ ID NO: 260, SEQ ID NO: 262, SEQ ID NO: 264, SEQ ID NO: 266, SEQ ID NO: 268, SEQ ID NO: 270, SEQ ID NO: 272, SEQ ID NO: 283, SEQ ID NO: 285, SEQ ID NO: 287, SEQ ID NO: 289, SEQ ID NO: 291, SEQ ID NO: 293, SEQ ID NO: 295, SEQ ID NO: 297, SEQ ID NO: 299, SEQ ID NO: 301, SEQ ID NO: 303, SEQ ID NO: 305, SEQ ID NO: 307, SEQ ID NO: 309, SEQ ID NO: 311, SEQ ID NO: 313, SEQ ID NO: 315, SEQ ID NO: 317, SEQ ID NO: 319, SEQ ID NO: 321, SEQ ID NO: 323, SEQ ID NO: 325, SEQ ID NO: 327, SEQ ID NO: 329, SEQ ID NO: 331, SEQ ID NO: 333, SEQ ID NO: 335, SEQ ID NO: 337, SEQ ID NO: 339, SEQ ID NO: 341, SEQ ID NO: 343, SEQ ID NO: 345, SEQ ID NO: 347, SEQ ID NO: 349, SEQ ID NO: 351, SEQ ID NO: 353, SEQ ID NO: 355, SEQ ID NO: 357, SEQ ID NO: 359, SEQ ID NO: 361, SEQ ID NO: 363, SEQ ID NO: 365, SEQ ID NO: 367, SEQ ID NO: 369, SEQ ID NO: 371, SEQ ID NO: 373, SEQ ID NO: 375, SEQ ID NO: 377, SEQ ID NO: 379, SEQ ID NO: 381, SEQ ID NO: 383, SEQ ID NO: 385, SEQ ID NO: 387, SEQ ID NO: 389, SEQ ID NO: 391, SEQ ID NO: 393, SEQ ID NO: 395, SEQ ID NO: 397, SEQ ID NO: 399, SEQ ID NO: 401, SEQ ID NO: 403, SEQ ID NO: 405, SEQ ID NO: 407, SEQ ID NO: 409, SEQ ID NO: 411, SEQ ID NO: 413, SEQ ID NO: 415, SEQ ID NO: 417, SEQ ID NO: 419, SEQ ID NO: 421, SEQ ID NO: 423, SEQ ID NO: 425, SEQ ID NO: 427, SEQ ID NO: 429, SEQ ID NO: 431, SEQ ID NO: 433, SEQ ID NO: 435 or SEQ ID NO: 441 also mean truncated sequences, cDNA, single-stranded DNA or RNA of the coding and noncoding DNA sequence. Homologues of SEQ ID NO: 1, SEQ ID NO: 3, SEQ ID NO: 5, SEQ ID NO: 7, SEQ ID NO: 9, SEQ ID NO: 11, SEQ ID NO: 13, SEQ ID NO: 15, SEQ ID NO: 19, SEQ ID NO: 21, SEQ ID NO: 23, SEQ ID NO: 25, SEQ ID NO: 27, SEQ ID NO: 29, SEQ ID NO: 31; SEQ ID NO: 64, SEQ ID NO: 66, SEQ ID NO: 68, SEQ ID NO: 70, SEQ ID NO: 72, SEQ ID NO: 74, SEQ ID NO: 76, SEQ ID NO: 78, SEQ ID NO: 80, SEQ ID NO: 82, SEQ ID NO: 84, SEQ ID NO: 86, SEQ ID NO: 88, SEQ ID NO: 90, SEQ ID NO: 92, SEQ ID NO: 94, SEQ ID NO: 96, SEQ ID NO: 98, SEQ ID NO: 100, SEQ ID NO: 102, SEQ ID NO: 104, SEQ ID NO: 106, SEQ ID NO: 108, SEQ ID NO: 110, SEQ ID NO: 112, SEQ ID NO: 114, SEQ ID NO: 116, SEQ ID NO: 118, SEQ ID NO: 120, SEQ ID NO: 122, SEQ ID NO: 124, SEQ ID NO: 126, SEQ ID NO: 128, SEQ ID NO: 130, SEQ ID NO: 132, SEQ ID NO: 134, SEQ ID NO: 136, SEQ ID NO: 138, SEQ ID NO: 140, SEQ ID NO: , SEQ ID NO: 142, SEQ ID NO: 151, SEQ ID NO: 153, SEQ ID NO: 155, SEQ ID NO: 157, SEQ ID NO: 159, SEQ ID NO: 161, SEQ ID NO: 163, SEQ ID NO: 165, SEQ ID NO: 167, SEQ ID NO: 169, SEQ ID NO: 171, SEQ ID NO: 173, SEQ ID NO: 175, SEQ ID NO: 177, SEQ ID NO: 179, SEQ ID NO: 181, SEQ ID NO: 183, SEQ ID NO: 185, SEQ ID NO: 187, SEQ ID NO: 189, SEQ ID NO: 191, SEQ ID NO: 193, SEQ ID NO: 195, SEQ ID NO: 197, SEQ ID NO: 199, SEQ ID NO: 201, SEQ ID NO: 203, SEQ ID NO: 205, SEQ ID NO: 207, SEQ ID NO: 209, SEQ ID NO: 211, SEQ ID NO: 213, SEQ ID NO: 215, SEQ ID NO: 217, SEQ ID NO: 219, SEQ ID NO: 228, SEQ ID NO: 230, SEQ ID NO: 232, SEQ ID NO: 234, SEQ ID NO: 236, SEQ ID NO: 238, SEQ ID NO: 240, SEQ ID NO: 242, SEQ ID NO: 249, SEQ ID NO: 251, SEQ ID NO: 253, SEQ ID NO: 255, SEQ ID NO: 257, SEQ ID NO: 259, SEQ ID NO: 261, SEQ ID NO: 263, SEQ ID NO: 265, SEQ ID NO: 267, SEQ ID NO: 269, SEQ ID NO: 271, SEQ ID NO: 282, SEQ ID NO: 284, SEQ ID NO: 286, SEQ ID NO: 288, SEQ ID NO: 290, SEQ ID NO: 292, SEQ ID NO: 294, SEQ ID NO: 296, SEQ ID NO: 298, SEQ ID NO: 300, SEQ ID NO: 302, SEQ ID NO: 304, SEQ ID NO: 306, SEQ ID NO: 308, SEQ ID NO: 310, SEQ ID NO: 312, SEQ ID NO: 314, SEQ ID NO: 316, SEQ ID NO: 318, SEQ ID NO: 320, SEQ ID NO: 322, SEQ ID NO: 324, SEQ ID NO: 326, SEQ ID NO: 328, SEQ ID NO: 330, SEQ ID NO: 332, SEQ ID NO: 334, SEQ ID NO: 336, SEQ ID NO: 338, SEQ ID NO: 340, SEQ ID NO: 342, SEQ ID NO: 344, SEQ ID NO: 346, SEQ ID NO: 348, SEQ ID NO: 350, SEQ ID NO: 352, SEQ ID NO: 354, SEQ ID NO: 356, SEQ ID NO: 358, SEQ ID NO: 360, SEQ ID NO: 362, SEQ ID NO: 364, SEQ ID NO: 366, SEQ ID NO: 368, SEQ ID NO: 370, SEQ ID NO: 372, SEQ ID NO: 374, SEQ ID NO: 376, SEQ ID NO: 378, SEQ ID NO: 380, SEQ ID NO: 382, SEQ ID NO: 384, SEQ ID NO: 386, SEQ ID NO: 388, SEQ ID NO: 390, SEQ ID NO: 392, SEQ ID NO: 394, SEQ ID NO: 396, SEQ ID NO: 398, SEQ ID NO: 400, SEQ ID NO: 402, SEQ ID NO: 404, SEQ ID NO: 406, SEQ ID NO: 408, SEQ ID NO: 410, SEQ ID NO: 412, SEQ ID NO: 414, SEQ ID NO: 416, SEQ ID NO: 418, SEQ ID NO: 420, SEQ ID NO: 422, SEQ ID NO: 424, SEQ ID NO: 426, SEQ ID NO: 428, SEQ ID NO: 430, SEQ ID NO: 432, SEQ ID NO: 434 or SEQ ID NO: 440 or the derived sequences of SEQ ID NO: 2, SEQ ID NO: 4, SEQ ID NO: 6, SEQ ID NO: 8, SEQ ID NO: 10, SEQ ID NO: 12, SEQ ID NO: 14, SEQ ID NO: 16, SEQ ID NO: 20, SEQ ID NO: 22, SEQ ID NO: 24, SEQ ID NO: 26, SEQ ID NO: 28, SEQ ID NO. 30, SEQ ID NO: 32; SEQ ID NO: 65, SEQ ID NO: 67, SEQ ID NO: 69, SEQ ID NO: 71, SEQ ID NO: 73, SEQ ID NO: 75, SEQ ID NO: 77, SEQ ID NO: 79, SEQ ID NO: 81, SEQ ID NO: 83, SEQ ID NO: 85, SEQ ID NO: 87, SEQ ID NO: 89, SEQ ID NO: 91, SEQ ID NO: 93, SEQ ID NO: 95, SEQ ID NO: 97, SEQ ID NO: 99, SEQ ID NO: 101, SEQ ID NO: 103, SEQ ID NO: 105, SEQ ID NO: 107, SEQ ID NO: 109, SEQ ID NO: 111, SEQ ID NO: 113, SEQ ID NO: 115, SEQ ID NO: 117, SEQ ID NO: 119, SEQ ID NO: 121, SEQ ID NO: 123, SEQ ID NO: 125, SEQ ID NO: 127, SEQ ID NO: 129, SEQ ID NO: 131, SEQ ID NO: 133, SEQ ID NO: 135, SEQ ID NO: 137, SEQ ID NO: 139, SEQ ID NO: 141, SEQ ID NO: 143, SEQ ID NO: 152, SEQ ID NO: 154, SEQ ID NO: 156, SEQ ID NO: 158, SEQ ID NO: 160, SEQ ID NO: 162, SEQ ID NO: 164, SEQ ID NO: 166, SEQ ID NO: 168, SEQ ID NO: 170, SEQ ID NO: 172, SEQ ID NO: 174, SEQ ID NO: 176, SEQ ID NO: 178, SEQ ID NO: 180, SEQ ID NO: 182, SEQ ID NO: 184, SEQ ID NO: 186, SEQ ID NO: 188, SEQ ID NO: 190, SEQ ID NO: 192, SEQ ID NO: 194, SEQ ID NO: 196, SEQ ID NO: 198, SEQ ID NO: 200, SEQ ID NO: 202, SEQ ID NO: 204, SEQ ID NO: 206, SEQ ID NO: 208, SEQ ID NO: 210, SEQ ID NO: 212, SEQ ID NO: 214, SEQ ID NO: 216, SEQ ID NO: 218, SEQ ID NO: 220, SEQ ID NO: 229, SEQ ID NO:231, SEQ ID NO:233, SEQ ID NO: 235, SEQ ID NO: 237, SEQ ID NO: 239, SEQ ID NO: 241, SEQ ID NO: 243, SEQ ID NO: 250, SEQ ID NO: 252, SEQ ID NO: 254, SEQ ID NO: 256, SEQ ID NO: 258, SEQ ID NO: 260, SEQ ID NO: 262, SEQ ID NO: 264, SEQ ID NO: 266, SEQ ID NO: 268, SEQ ID NO: 270, SEQ ID NO: 272, SEQ ID NO: 283, SEQ ID NO: 285, SEQ ID NO: 287, SEQ ID NO: 289, SEQ ID NO: 291, SEQ ID NO: 293, SEQ ID NO: 295, SEQ ID NO: 297, SEQ ID NO: 299, SEQ ID NO: 301, SEQ ID NO: 303, SEQ ID NO: 305, SEQ ID NO: 307, SEQ ID NO: 309, SEQ ID NO: 311, SEQ ID NO: 313, SEQ ID NO: 315, SEQ ID NO: 317, SEQ ID NO: 319, SEQ ID NO: 321, SEQ ID NO: 323, SEQ ID NO: 325, SEQ ID NO: 327, SEQ ID NO: 329, SEQ ID NO: 331, SEQ ID NO: 333, SEQ ID NO: 335, SEQ ID NO: 337, SEQ ID NO: 339, SEQ ID NO: 341, SEQ ID NO: 343, SEQ ID NO: 345, SEQ ID NO: 347, SEQ ID NO: 349, SEQ ID NO: 351, SEQ ID NO: 353, SEQ ID NO: 355, SEQ ID NO: 357, SEQ ID NO: 359, SEQ ID NO: 361, SEQ ID NO: 363, SEQ ID NO: 365, SEQ ID NO: 367, SEQ ID NO: 369, SEQ ID NO: 371, SEQ ID NO: 373, SEQ ID NO: 375, SEQ ID NO: 377, SEQ ID NO: 379, SEQ ID NO: 381, SEQ ID NO: 383, SEQ ID NO: 385, SEQ ID NO: 387, SEQ ID NO: 389, SEQ ID NO: 391, SEQ ID NO: 393, SEQ ID NO: 395, SEQ ID NO: 397, SEQ ID NO: 399, SEQ ID NO: 401, SEQ ID NO: 403, SEQ ID NO: 405, SEQ ID NO: 407, SEQ ID NO: 409, SEQ ID NO: 411, SEQ ID NO: 413, SEQ ID NO: 415, SEQ ID NO: 417, SEQ ID NO: 419, SEQ ID NO: 421, SEQ ID NO: 423, SEQ ID NO: 425, SEQ ID NO: 427, SEQ ID NO: 429, SEQ ID NO: 431, SEQ ID NO: 433, SEQ ID NO: 435 or SEQ ID NO: 441 are also understood as meaning derivatives which comprise noncoding regions such as, for example, UTRs, terminators, enhancers or promoter variants. The promoters upstream of the nucleotide sequences stated can be modified by one or more nucleotide substitution(s), insertion(s) and/or deletion(s) with, however, preferably interfering with the functionality or activity either of the promoters, the open reading frame (=ORF) or with the 3′-regulatory region such as terminators or other 3′regulatory regions, which are far away from the ORF. It is furthermore possible that the activity of the promoters is decreased by modification of their sequence or their regulation, or that they are replaced completely by less active promoters and thereby the activity of the expressed nucleic acid sequence is reduced or deleted, even promoters from heterologous organisms. Appropriate promoters are known to the person skilled in the art and are mentioned herein be low. Further methods exists to modulate the promoters of the genes of the invention, e.g. by modifying the activity of transacting factors, meaning natural or artificial transcription factors, which can bind to the promoter and influence its activity. Furthermore it is possible to influence promoters of interest by modifying upstream signaling components like receptors or kinases, which are involved in the regulation of the promoter of interest.

[0314] In a further embodiment, the process according to the present invention comprises the following steps:
[0315] (a) selecting an organism or a part thereof expressing the polypeptide of this invention;
[0316] (b) mutagenizing the selected organism or the part thereof;
[0317] (c) comparing the activity or the expression level of said polypeptide in the mutagenized organism or the part thereof with the activity or the expression of said polypeptide in the selected organisms or the part thereof;
[0318] (d) selecting the mutagenized organisms or parts thereof, which comprise a decreased activity or expression level of said polypeptide compared to the selected organism (a) or the part thereof;
[0319] (e) optionally, growing and cultivating the organisms or the parts thereof; and
[0320] (f) recovering, and optionally isolating, the free or bound compound of the invention produced by the selected mutated organisms or parts thereof.

[0321] The organisms or part thereof produce according to the herein mentioned process of the invention an increased level of free and/or protein-bound methionine compared to said control or selected organisms or parts thereof.

[0322] Advantageously the selected organisms were mutagenized according to the invention. According to the invention mutagenesis is any change of the genetic information in the genome of an organism, that means any structural or compositional change in the nucleic acid preferably DNA of an organism that is not caused by normal segregation or genetic recombination processes. Such mutations may occur spontaneously, or may be induced by mutagens as described below. Such change can be induced either randomly or selectively. In both cases the genetic information of the organism is modified. In general this leads to the situation that the activity of the gene product of the relevant genes inside the cells or inside the organism is reduced or repressed.

[0323] In case of the specific or so called site directed mutagenesis a distinct gene is mutated and thereby its activity and/or the activity or the encoded gene product is repressed, reduced, decreased or deleted. In the event of a random mutagenesis one or more genes are mutated by chance and their activities and/or the activities of their gene products are repressed, reduced, decreased or deleted, preferably decreased or deleted.

[0324] For the purpose of a mutagenesis of a huge population of organisms, such population can be transformed with a DNA population or a DNA bank, which are useful for the inhibition of as much as possible genes of an organism, preferably all genes. With this method it is possible to statistically mutagenize nearly all genes of an organism by the integration of an advantageously identified DNA-fragment. Afterwards the skilled worker can easily identify the knocked out event. For the mutagenesis of plants EMS, T-DNA and/or transposon mutagenesis is preferred.

[0325] In the event of a random mutagenesis a huge number of organisms are treated with a mutagenic agent. The amount of said agent and the intensity of the treatment will be chosen in such a manner that statistically nearly every gene is mutated. The process for the random mutagenesis as well as the respective agents is well known by the skilled person. Such methods are disclosed for example by A. M. van Harten [(1998), “Mutation breeding: theory and practical applications”, Cambridge University Press, Cambridge, UK], E Friedberg, G Walker, W Siede [(1995), “DNA Repair and Mutagenesis”, Blackwell Publishing], or K. Sankaranarayanan, J. M. Gentile, L. R. Ferguson [(2000), “Protocols in Mutagenesis”, Elsevier Health Sciences]. As the skilled worker knows the spontaneous mutation rate in the cells of an organism is very low and that a large number of chemical, physical or biological agents are available for the mutagenesis of organisms. These agents are named as mutagens or mutagenic agents. As mentioned before three different kinds of mutagens chemical, physical or biological agents are available.

[0326] There are different classes of chemical mutagens, which can be separated by their mode of action. For example base analogues such as 5-bromouracil, 2-amino purin. Other chemical mutagens are interacting with the DNA such as sulphuric acid, nitrous acid, hydroxylamine; or other alkylating agents such as monofunctional agents like ethyl methanesulfonate (=EMS), dimethylsulfate, methyl methanesulfonate, bifunctional like dichloroethyl sulphide, Mitomycin, Nitrosoguanidine—dialkylnitrosamine, N-Nitrosoguanidin derivatives, N-alkyl-N-nitro-N-nitrosoguanidine, intercalating dyes like Acridine, ethidium bromide.

[0327] Physical mutagens are for example ionizing irradiation (X-ray), UV irradiation. Different forms of irradiation are available and they are strong mutagens. Two main classes of irradiation can be distinguished: a) non-ionizing irradiation such as UV light or ionizing irradiation such as X-ray. Biological mutagens are for example transposable elements for example IS elements such as IS100, transposons such as Tn5, Tn10, Tn903, Tn916 or Tn1000 or phages like Mu^{amplac}, P1, T5, λplac etc. Methods for introducing this phage DNA into the appropriate microorganism are well known to the skilled worker (see Microbiology, Third Edition, Eds. Davis, B. D., Dulbecco, R., Eisen, H. N. and Ginsberg, H. S., Harper International Edition, 1980). The common procedure of a transposon mutagenesis is the insertion of a transposable element within a gene or nearby for example in the promotor or terminator region and thereby leading to a loss of the gene function. Procedures to localize the transposon within the genome of the organisms are well known by a person skilled in the art. For transposon mutagenesis in plants the maize transposon systems Activator-Dissociation (Ac/Ds) and Enhancer-Supressor mutator (En/Spm) are known to the worker skilled in the art but other transposon systems might be similar useful. The transposons can be brought into the plant genomes by different available standard techniques for plant transformations. Another type of biological mutagenesis in plants includes the T-DNA mutagenesis, meaning the random integration of T-DNA sequences into the plant genome [Feldmann, K. A. (1991) T-DNA insertion mutagenesis in Arabidopsis: Mutational spectrum. Plant J. 1, 71-82]. The event in which the gene of interest is mutated can later be searched by PCR- or other high throughput technologies [Krysan et al., (1999) T_DNA as an insertional mutagen in Arabidopsis, Plant Cell, 11, 2283-2290].

[0328] Methods for the creation of microorganisms with a reduced decreased or deleted biological activity of the nucleic acid sequence of the invention or the encoded proteins are well known to the person skilled in the art. In gram-positive bacteria such as Brevibacterium, Corynebacterium, Rhodococcus or Bacillus IS elements can be used for said purpose as described by Schafer et al. [Gene 1994, Jul. 22, 145 (1): 69-73]. Methods for the mutagenese of bacteria are well known for the skilled worker.

[0329] Another very efficient method is the introduction of mutations into the genome of bacteria with the aid of transposons (=Tn). Transposons have some common properties, which make them useful as tool for the mutagenesis. Such properties are for example ubiquitous finding in nature for example they are found on chromosomes, plasmids and phages. The transposition of the transposons in the genome is rec-independent and has a general frequency of 10⁻⁴-10⁻⁷. Transposons are in the possession of an encoded transposase and inverted terminal repeats at their ends. Furthermore they need for integration in the genome a minimal target sequence specificity, bordering on random. Like plasmids they often confer antibiotic resistance. As an advantage they generate polar mutations. Three kinds of transposons are distinguished from one another a) conservative transposons: copy number doesn't increase upon transposition; b) replicative transposons: transposon is copied upon transposition resulting in two copies and c) conjugative transposons: transposon encodes Tra functions, excises and transfers to another host. As the skilled worker knows methods have been developed which facilitate the introduction of transposable elements into a wide variety of both gram negative and gram positive bacteria. Therefore transposable elements can be introduced into the genome of nearly every bacteria. They insert somewhat randomly thus causing insertion mutations. Since the average bacterial species has approximately 3000 genes, one can saturate the chromosome with ease. Furthermore, the transposon provides a molecular tag, which can be subsequently used to identify the mutated gene and clone it. In combination with genomics, transposons are a powerful approach to mutate distinct genes. As mentioned before there are many different methods to introduce transposons into bacteria. The choice will depend on the nature of the target bacterium. Transposons can be introduced into the genome of a bacteria for example with the aid of a temperature-sensitive replicon, a so called bump plasmid by introduction of an incompatible replicon, a transfer plasmid lacking essential replication protein supplied in trans in donor cell or phage that lacks replication in the host organism. Typically well known transposons are Tn5, Tn10, Tn903, Tn916, Tn1000 etc.

[0330] Other methods are for example the introduction of mutation with the aid of viruses such as bacteriophages such as P1, P22, T2, T3, T5, T7, Mu^{amplac}, Mu, Mu1, MuX, miniMu, λ, λplac or insertion elements such as IS3, IS100, IS900 etc. Again the whole genome of the bacteria is randomly mutagenized. Mutants can be easily identified.

[0331] Another method to disrupt the nucleic acid sequence of the invention and thereby reducing, decreasing or deleting the biological activity of the encoded polypeptide can be reached by homologous recombination with an altered nucleic acid sequence of the invention. The nucleic acid sequences of the invention can therefore be altered by one or more point mutations, deletions, or inversions, but still encodes a functional protein of the invention or a non-functional protein. In another embodiment of the invention, one or more of the regulatory regions (e.g., a promoter, repressor, or inducer) of the gene encoding the protein of the invention has been altered (e.g., by deletion, truncation, inversion, or point mutation) such that the expression of the corresponding gene is modulated that means reduced, decreased or deleted.

[0332] Preferably a chemical or biochemical procedure is used for the mutagenesis of the organisms. A preferred chemical method is the mutagenesis with N-methyl-N-nitro-nitrosoguanidine.

[0333] Other biological methods are disclosed by Spee et al. (Nucleic Acids Research, Vol. 21, No. 3, 1993: 777-778). Spee et al. teaches a PCR method using dITP for the random mutagenesis. This method described by Spee et al. was further improved by Rellos et al. (Protein Expr. Purif., 5, 1994: 270-277). The use of an in vitro recombination technique for molecular mutagenesis is described by Stemmer (Proc. Natl. Acad. Sci. USA, Vol. 91, 1994: 10747-10751). Moore et al. (Nature Biotechnology Vol. 14, 1996: 458-467) describe the combination of the PCR and recombination methods for increasing the enzymatic activity of an esterase toward a para-nitrobenzyl ester. Another route to the mutagenesis of enzymes is described by Greener et al. in Methods in Molecular Biology (Vol. 57, 1996: 375-385). Greener et al. use the specific Escherichia coli strain XL1-Red to generate Escherichia coli mutants which have increased antibiotic resistance.

[0334] In one embodiment, the protein according to the invention or the nucleic acid molecule characterized herein originates from an eukaryotic or prokaryotic organism such as a non-human animal, a plant, a microorganism such as a fungi, a yeast, an alga, a diatom or a bacterium. Nucleic acids, which advantageously can be used in the inventive process originate from plants, for example the family Brassicaceae, in particular the genus Brassica, Melanosinapis, Sinapis or Arabidopsis and the especially advantageous from the species Arabidopsis thaliana. In addition nucleic acid sequences, which advantageously can be used in the inventive process originate from plants such as maize, soja, canola, wheat, barley, triticale, rice, linseed, sunflower or potato. Sequence SEQ ID NO: 2 is deposited under the Genebank Accession number At2g25320 (RefSeq Accession NM_{—}128089). Sequence SEQ ID NO: 8 is deposited under the Genebank Accession number At3g07610 (RefSeq Accession NP_{—}187418). Sequence SEQ ID NO: 20 is deposited under the Genebank Accession number At3g15600 (RefSeq Accession NM_{—}112428.1). Sequence SEQ ID NO: 65 is deposited under the Genebank Accession number At1g14490 (RefSeq Accession NM_{—}101316). Sequence SEQ ID NO: 152 is deposited under the Genebank Accession number At1g30570 (RefSeq Accession NM_{—}102794). Sequence SEQ ID NO: 229 is deposited under the Genebank Accession number At2g21290 (RefSeq Accession NM_{—}127701) and the sequence SEQ ID NO: 283 is deposited under the Genebank Accession number At3g14230 (RefSeq Accession NM_{—}108251).

[0335] In another preferred embodiment of the invention the nucleic acids, which can be used in the inventive process originate from the family Enterobacteriacea such as from the genera Echerichia, Salmonella, Klebsiella as mentioned above for example from the species E. coli.

[0336] Accordingly, in one embodiment, the invention relates to an isolated nucleic acid molecule which comprises a nucleic acid molecule selected from the group consisting of:
[0337] a) nucleic acid molecule which encodes a polypeptide comprising the polypeptide shown in SEQ ID NO: 2, SEQ ID NO: 4, SEQ ID NO: 6, SEQ ID NO: 8, SEQ ID NO: 10, SEQ ID NO: 12, SEQ ID NO: 14, SEQ ID NO: 16, SEQ ID NO: 20, SEQ ID NO: 22, SEQ ID NO: 24, SEQ ID NO: 26, SEQ ID NO: 28, SEQ ID NO. 30, SEQ ID NO: 32; SEQ ID NO: 65, SEQ ID NO: 67, SEQ ID NO: 69, SEQ ID NO: 71, SEQ ID NO: 73, SEQ ID NO: 75, SEQ ID NO: 77, SEQ ID NO: 79, SEQ ID NO: 81, SEQ ID NO: 83, SEQ ID NO: 85, SEQ ID NO: 87, SEQ ID NO: 89, SEQ ID NO: 91, SEQ ID NO: 93, SEQ ID NO: 95, SEQ ID NO: 97, SEQ ID NO: 99, SEQ ID NO: 101, SEQ ID NO: 103, SEQ ID NO: 105, SEQ ID NO: 107, SEQ ID NO: 109, SEQ ID NO: 111, SEQ ID NO: 113, SEQ ID NO: 115, SEQ ID NO: 117, SEQ ID NO: 119, SEQ ID NO: 121, SEQ ID NO: 123, SEQ ID NO: 125, SEQ ID NO: 127, SEQ ID NO: 129, SEQ ID NO: 131, SEQ ID NO: 133, SEQ ID NO: 135, SEQ ID NO: 137, SEQ ID NO: 139, SEQ ID NO: 141, SEQ ID NO: 143, SEQ ID NO: 152, SEQ ID NO: 154, SEQ ID NO: 156, SEQ ID NO: 158, SEQ ID NO: 160, SEQ ID NO: 162, SEQ ID NO: 164, SEQ ID NO: 166, SEQ ID NO: 168, SEQ ID NO: 170, SEQ ID NO: 172, SEQ ID NO: 174, SEQ ID NO: 176, SEQ ID NO: 178, SEQ ID NO: 180, SEQ ID NO: 182, SEQ ID NO: 184, SEQ ID NO: 186, SEQ ID NO: 188, SEQ ID NO: 190, SEQ ID NO: 192, SEQ ID NO: 194, SEQ ID NO: 196, SEQ ID NO: 198, SEQ ID NO: 200, SEQ ID NO: 202, SEQ ID NO: 204, SEQ ID NO: 206, SEQ ID NO: 208, SEQ ID NO: 210, SEQ ID NO: 212, SEQ ID NO: 214, SEQ ID NO: 216, SEQ ID NO: 218, SEQ ID NO: 220, SEQ ID NO: 229, SEQ ID NO:231, SEQ ID NO:233, SEQ ID NO: 235, SEQ ID NO: 237, SEQ ID NO: 239, SEQ ID NO: 241, SEQ ID NO: 243, SEQ ID NO: 250, SEQ ID NO: 252, SEQ ID NO: 254, SEQ ID NO: 256, SEQ ID NO: 258, SEQ ID NO: 260, SEQ ID NO: 262, SEQ ID NO: 264, SEQ ID NO: 266, SEQ ID NO: 268, SEQ ID NO: 270, SEQ ID NO: 272, SEQ ID NO: 283, SEQ ID NO: 285, SEQ ID NO: 287, SEQ ID NO: 289, SEQ ID NO: 291, SEQ ID NO: 293, SEQ ID NO: 295, SEQ ID NO: 297, SEQ ID NO: 299, SEQ ID NO: 301, SEQ ID NO: 303, SEQ ID NO: 305, SEQ ID NO: 307, SEQ ID NO: 309, SEQ ID NO: 311, SEQ ID NO: 313, SEQ ID NO: 315, SEQ ID NO: 317, SEQ ID NO: 319, SEQ ID NO: 321, SEQ ID NO: 323, SEQ ID NO: 325, SEQ ID NO: 327, SEQ ID NO: 329, SEQ ID NO: 331, SEQ ID NO: 333, SEQ ID NO: 335, SEQ ID NO: 337, SEQ ID NO: 339, SEQ ID NO: 341, SEQ ID NO: 343, SEQ ID NO: 345, SEQ ID NO: 347, SEQ ID NO: 349, SEQ ID NO: 351, SEQ ID NO: 353, SEQ ID NO: 355, SEQ ID NO: 357, SEQ ID NO: 359, SEQ ID NO: 361, SEQ ID NO: 363, SEQ ID NO: 365, SEQ ID NO: 367, SEQ ID NO: 369, SEQ ID NO: 371, SEQ ID NO: 373, SEQ ID NO: 375, SEQ ID NO: 377, SEQ ID NO: 379, SEQ ID NO: 381, SEQ ID NO: 383, SEQ ID NO: 385, SEQ ID NO: 387, SEQ ID NO: 389, SEQ ID NO: 391, SEQ ID NO: 393, SEQ ID NO: 395, SEQ ID NO: 397, SEQ ID NO: 399, SEQ ID NO: 401, SEQ ID NO: 403, SEQ ID NO: 405, SEQ ID NO: 407, SEQ ID NO: 409, SEQ ID NO: 411, SEQ ID NO: 413, SEQ ID NO: 415, SEQ ID NO: 417, SEQ ID NO: 419, SEQ ID NO: 421, SEQ ID NO: 423, SEQ ID NO: 425, SEQ ID NO: 427, SEQ ID NO: 429, SEQ ID NO: 431, SEQ ID NO: 433, SEQ ID NO: 435 or SEQ ID NO: 441;
[0338] b) nucleic acid molecule comprising the polynucleotide shown in SEQ ID NO: 2, SEQ ID NO: 4, SEQ ID NO: 6, SEQ ID NO: 8, SEQ ID NO: 10, SEQ ID NO: 12, SEQ ID NO: 14, SEQ ID NO: 16, SEQ ID NO: 20, SEQ ID NO: 22, SEQ ID NO: 24, SEQ ID NO: 26, SEQ ID NO: 28, SEQ ID NO. 30, SEQ ID NO: 32; SEQ ID NO: 65, SEQ ID NO: 67, SEQ ID NO: 69, SEQ ID NO: 71, SEQ ID NO: 73, SEQ ID NO: 75, SEQ ID NO: 77, SEQ ID NO: 79, SEQ ID NO: 81, SEQ ID NO: 83, SEQ ID NO: 85, SEQ ID NO: 87, SEQ ID NO: 89, SEQ ID NO: 91, SEQ ID NO: 93, SEQ ID NO: 95, SEQ ID NO: 97, SEQ ID NO: 99, SEQ ID NO: 101, SEQ ID NO: 103, SEQ ID NO: 105, SEQ ID NO: 107, SEQ ID NO: 109, SEQ ID NO: 111, SEQ ID NO: 113, SEQ ID NO: 115, SEQ ID NO: 117, SEQ ID NO: 119, SEQ ID NO: 121, SEQ ID NO: 123, SEQ ID NO: 125, SEQ ID NO: 127, SEQ ID NO: 129, SEQ ID NO: 131, SEQ ID NO: 133, SEQ ID NO: 135, SEQ ID NO: 137, SEQ ID NO: 139, SEQ ID NO: 141, SEQ ID NO: 143, SEQ ID NO: 152, SEQ ID NO: 154, SEQ ID NO: 156, SEQ ID NO: 158, SEQ ID NO: 160, SEQ ID NO: 162, SEQ ID NO: 164, SEQ ID NO: 166, SEQ ID NO: 168, SEQ ID NO: 170, SEQ ID NO: 172, SEQ ID NO: 174, SEQ ID NO: 176, SEQ ID NO: 178, SEQ ID NO: 180, SEQ ID NO: 182, SEQ ID NO: 184, SEQ ID NO: 186, SEQ ID NO: 188, SEQ ID NO: 190, SEQ ID NO: 192, SEQ ID NO: 194, SEQ ID NO: 196, SEQ ID NO: 198, SEQ ID NO: 200, SEQ ID NO: 202, SEQ ID NO: 204, SEQ ID NO: 206, SEQ ID NO: 208, SEQ ID NO: 210, SEQ ID NO: 212, SEQ ID NO: 214, SEQ ID NO: 216, SEQ ID NO: 218, SEQ ID NO: 220, SEQ ID NO: 229, SEQ ID NO:231, SEQ ID NO:233, SEQ ID NO: 235, SEQ ID NO: 237, SEQ ID NO: 239, SEQ ID NO: 241, SEQ ID NO: 243, SEQ ID NO: 250, SEQ ID NO: 252, SEQ ID NO: 254, SEQ ID NO: 256, SEQ ID NO: 258, SEQ ID NO: 260, SEQ ID NO: 262, SEQ ID NO: 264, SEQ ID NO: 266, SEQ ID NO: 268, SEQ ID NO: 270, SEQ ID NO: 272, SEQ ID NO: 283, SEQ ID NO: 285, SEQ ID NO: 287, SEQ ID NO: 289, SEQ ID NO: 291, SEQ ID NO: 293, SEQ ID NO: 295, SEQ ID NO: 297, SEQ ID NO: 299, SEQ ID NO: 301, SEQ ID NO: 303, SEQ ID NO: 305, SEQ ID NO: 307, SEQ ID NO: 309, SEQ ID NO: 311, SEQ ID NO: 313, SEQ ID NO: 315, SEQ ID NO: 317, SEQ ID NO: 319, SEQ ID NO: 321, SEQ ID NO: 323, SEQ ID NO: 325, SEQ ID NO: 327, SEQ ID NO: 329, SEQ ID NO: 331, SEQ ID NO: 333, SEQ ID NO: 335, SEQ ID NO: 337, SEQ ID NO: 339, SEQ ID NO: 341, SEQ ID NO: 343, SEQ ID NO: 345, SEQ ID NO: 347, SEQ ID NO: 349, SEQ ID NO: 351, SEQ ID NO: 353, SEQ ID NO: 355, SEQ ID NO: 357, SEQ ID NO: 359, SEQ ID NO: 361, SEQ ID NO: 363, SEQ ID NO: 365, SEQ ID NO: 367, SEQ ID NO: 369, SEQ ID NO: 371, SEQ ID NO: 373, SEQ ID NO: 375, SEQ ID NO: 377, SEQ ID NO: 379, SEQ ID NO: 381, SEQ ID NO: 383, SEQ ID NO: 385, SEQ ID NO: 387, SEQ ID NO: 389, SEQ ID NO: 391, SEQ ID NO: 393, SEQ ID NO: 395, SEQ ID NO: 397, SEQ ID NO: 399, SEQ ID NO: 401, SEQ ID NO: 403, SEQ ID NO: 405, SEQ ID NO: 407, SEQ ID NO: 409, SEQ ID NO: 411, SEQ ID NO: 413, SEQ ID NO: 415, SEQ ID NO: 417, SEQ ID NO: 419, SEQ ID NO: 421, SEQ ID NO: 423, SEQ ID NO: 425, SEQ ID NO: 427, SEQ ID NO: 429, SEQ ID NO: 431, SEQ ID NO: 433, SEQ ID NO: 435 or SEQ ID NO: 441;
[0339] c) nucleic acid molecule comprising a nucleic acid sequence, which, as a result of the degeneracy of the genetic code, can be derived from a polypeptide sequence depicted (b) and having the biological activity represented by the protein as depicted in SEQ ID NO: 2, SEQ ID NO: 4, SEQ ID NO: 6, SEQ ID NO: 8, SEQ ID NO: 10, SEQ ID NO: 12, SEQ ID NO: 14, SEQ ID NO: 16, SEQ ID NO: 20, SEQ ID NO: 22, SEQ ID NO: 24, SEQ ID NO: 26, SEQ ID NO: 28, SEQ ID NO. 30, SEQ ID NO: 32; SEQ ID NO: 65, SEQ ID NO: 67, SEQ ID NO: 69, SEQ ID NO: 71, SEQ ID NO: 73, SEQ ID NO: 75, SEQ ID NO: 77, SEQ ID NO: 79, SEQ ID NO: 81, SEQ ID NO: 83, SEQ ID NO: 85, SEQ ID NO: 87, SEQ ID NO: 89, SEQ ID NO: 91, SEQ ID NO: 93, SEQ ID NO: 95, SEQ ID NO: 97, SEQ ID NO: 99, SEQ ID NO: 101, SEQ ID NO: 103, SEQ ID NO: 105, SEQ ID NO: 107, SEQ ID NO: 109, SEQ ID NO: 111, SEQ ID NO: 113, SEQ ID NO: 115, SEQ ID NO: 117, SEQ ID NO: 119, SEQ ID NO: 121, SEQ ID NO: 123, SEQ ID NO: 125, SEQ ID NO: 127, SEQ ID NO: 129, SEQ ID NO: 131, SEQ ID NO: 133, SEQ ID NO: 135, SEQ ID NO: 137, SEQ ID NO: 139, SEQ ID NO: 141, SEQ ID NO: 143, SEQ ID NO: 152, SEQ ID NO: 154, SEQ ID NO: 156, SEQ ID NO: 158, SEQ ID NO: 160, SEQ ID NO: 162, SEQ ID NO: 164, SEQ ID NO: 166, SEQ ID NO: 168, SEQ ID NO: 170, SEQ ID NO: 172, SEQ ID NO: 174, SEQ ID NO: 176, SEQ ID NO: 178, SEQ ID NO: 180, SEQ ID NO: 182, SEQ ID NO: 184, SEQ ID NO: 186, SEQ ID NO: 188, SEQ ID NO: 190, SEQ ID NO: 192, SEQ ID NO: 194, SEQ ID NO: 196, SEQ ID NO: 198, SEQ ID NO: 200, SEQ ID NO: 202, SEQ ID NO: 204, SEQ ID NO: 206, SEQ ID NO: 208, SEQ ID NO: 210, SEQ ID NO: 212, SEQ ID NO: 214, SEQ ID NO: 216, SEQ ID NO: 218, SEQ ID NO: 220, SEQ ID NO: 229, SEQ ID NO:231, SEQ ID NO:233, SEQ ID NO: 235, SEQ ID NO: 237, SEQ ID NO: 239, SEQ ID NO: 241, SEQ ID NO: 243, SEQ ID NO: 250, SEQ ID NO: 252, SEQ ID NO: 254, SEQ ID NO: 256, SEQ ID NO: 258, SEQ ID NO: 260, SEQ ID NO: 262, SEQ ID NO: 264, SEQ ID NO: 266, SEQ ID NO: 268, SEQ ID NO: 270, SEQ ID NO: 272, SEQ ID NO: 283, SEQ ID NO: 285, SEQ ID NO: 287, SEQ ID NO: 289, SEQ ID NO: 291, SEQ ID NO: 293, SEQ ID NO: 295, SEQ ID NO: 297, SEQ ID NO: 299, SEQ ID NO: 301, SEQ ID NO: 303, SEQ ID NO: 305, SEQ ID NO: 307, SEQ ID NO: 309, SEQ ID NO: 311, SEQ ID NO: 313, SEQ ID NO: 315, SEQ ID NO: 317, SEQ ID NO: 319, SEQ ID NO: 321, SEQ ID NO: 323, SEQ ID NO: 325, SEQ ID NO: 327, SEQ ID NO: 329, SEQ ID NO: 331, SEQ ID NO: 333, SEQ ID NO: 335, SEQ ID NO: 337, SEQ ID NO: 339, SEQ ID NO: 341, SEQ ID NO: 343, SEQ ID NO: 345, SEQ ID NO: 347, SEQ ID NO: 349, SEQ ID NO: 351, SEQ ID NO: 353, SEQ ID NO: 355, SEQ ID NO: 357, SEQ ID NO: 359, SEQ ID NO: 361, SEQ ID NO: 363, SEQ ID NO: 365, SEQ ID NO: 367, SEQ ID NO: 369, SEQ ID NO: 371, SEQ ID NO: 373, SEQ ID NO: 375, SEQ ID NO: 377, SEQ ID NO: 379, SEQ ID NO: 381, SEQ ID NO: 383, SEQ ID NO: 385, SEQ ID NO: 387, SEQ ID NO: 389, SEQ ID NO: 391, SEQ ID NO: 393, SEQ ID NO: 395, SEQ ID NO: 397, SEQ ID NO: 399, SEQ ID NO: 401, SEQ ID NO: 403, SEQ ID NO: 405, SEQ ID NO: 407, SEQ ID NO: 409, SEQ ID NO: 411, SEQ ID NO: 413, SEQ ID NO: 415, SEQ ID NO: 417, SEQ ID NO: 419, SEQ ID NO: 421, SEQ ID NO: 423, SEQ ID NO: 425, SEQ ID NO: 427, SEQ ID NO: 429, SEQ ID NO: 431, SEQ ID NO: 433, SEQ ID NO: 435 or SEQ ID NO: 441;
[0340] d) nucleic acid molecule encoding a polypeptide having at least 50% identity with the amino acid sequence of the polypeptide encoded by the nucleic acid molecule of (a) or (c) and having the biological activity represented by the protein as depicted in SEQ ID NO: 2, SEQ ID NO: 4, SEQ ID NO: 6, SEQ ID NO: 8, SEQ ID NO: 10, SEQ ID NO: 12, SEQ ID NO: 14, SEQ ID NO: 16, SEQ ID NO: 20, SEQ ID NO: 22, SEQ ID NO: 24, SEQ ID NO: 26, SEQ ID NO: 28, SEQ ID NO. 30, SEQ ID NO: 32; SEQ ID NO: 65, SEQ ID NO: 67, SEQ ID NO: 69, SEQ ID NO: 71, SEQ ID NO: 73, SEQ ID NO: 75, SEQ ID NO: 77, SEQ ID NO: 79, SEQ ID NO: 81, SEQ ID NO: 83, SEQ ID NO: 85, SEQ ID NO: 87, SEQ ID NO: 89, SEQ ID NO: 91, SEQ ID NO: 93, SEQ ID NO: 95, SEQ ID NO: 97, SEQ ID NO: 99, SEQ ID NO: 101, SEQ ID NO: 103, SEQ ID NO: 105, SEQ ID NO: 107, SEQ ID NO: 109, SEQ ID NO: 111, SEQ ID NO: 113, SEQ ID NO: 115, SEQ ID NO: 117, SEQ ID NO: 119, SEQ ID NO: 121, SEQ ID NO: 123, SEQ ID NO: 125, SEQ ID NO: 127, SEQ ID NO: 129, SEQ ID NO: 131, SEQ ID NO: 133, SEQ ID NO: 135, SEQ ID NO: 137, SEQ ID NO: 139, SEQ ID NO: 141, SEQ ID NO: 143, SEQ ID NO: 152, SEQ ID NO: 154, SEQ ID NO: 156, SEQ ID NO: 158, SEQ ID NO: 160, SEQ ID NO: 162, SEQ ID NO: 164, SEQ ID NO: 166, SEQ ID NO: 168, SEQ ID NO: 170, SEQ ID NO: 172, SEQ ID NO: 174, SEQ ID NO: 176, SEQ ID NO: 178, SEQ ID NO: 180, SEQ ID NO: 182, SEQ ID NO: 184, SEQ ID NO: 186, SEQ ID NO: 188, SEQ ID NO: 190, SEQ ID NO: 192, SEQ ID NO: 194, SEQ ID NO: 196, SEQ ID NO: 198, SEQ ID NO: 200, SEQ ID NO: 202, SEQ ID NO: 204, SEQ ID NO: 206, SEQ ID NO: 208, SEQ ID NO: 210, SEQ ID NO: 212, SEQ ID NO: 214, SEQ ID NO: 216, SEQ ID NO: 218, SEQ ID NO: 220, SEQ ID NO: 229, SEQ ID NO:231, SEQ ID NO:233, SEQ ID NO: 235, SEQ ID NO: 237, SEQ ID NO: 239, SEQ ID NO: 241, SEQ ID NO: 243, SEQ ID NO: 250, SEQ ID NO: 252, SEQ ID NO: 254, SEQ ID NO: 256, SEQ ID NO: 258, SEQ ID NO: 260, SEQ ID NO: 262, SEQ ID NO: 264, SEQ ID NO: 266, SEQ ID NO: 268, SEQ ID NO: 270, SEQ ID NO: 272, SEQ ID NO: 283, SEQ ID NO: 285, SEQ ID NO: 287, SEQ ID NO: 289, SEQ ID NO: 291, SEQ ID NO: 293, SEQ ID NO: 295, SEQ ID NO: 297, SEQ ID NO: 299, SEQ ID NO: 301, SEQ ID NO: 303, SEQ ID NO: 305, SEQ ID NO: 307, SEQ ID NO: 309, SEQ ID NO: 311, SEQ ID NO: 313, SEQ ID NO: 315, SEQ ID NO: 317, SEQ ID NO: 319, SEQ ID NO: 321, SEQ ID NO: 323, SEQ ID NO: 325, SEQ ID NO: 327, SEQ ID NO: 329, SEQ ID NO: 331, SEQ ID NO: 333, SEQ ID NO: 335, SEQ ID NO: 337, SEQ ID NO: 339, SEQ ID NO: 341, SEQ ID NO: 343, SEQ ID NO: 345, SEQ ID NO: 347, SEQ ID NO: 349, SEQ ID NO: 351, SEQ ID NO: 353, SEQ ID NO: 355, SEQ ID NO: 357, SEQ ID NO: 359, SEQ ID NO: 361, SEQ ID NO: 363, SEQ ID NO: 365, SEQ ID NO: 367, SEQ ID NO: 369, SEQ ID NO: 371, SEQ ID NO: 373, SEQ ID NO: 375, SEQ ID NO: 377, SEQ ID NO: 379, SEQ ID NO: 381, SEQ ID NO: 383, SEQ ID NO: 385, SEQ ID NO: 387, SEQ ID NO: 389, SEQ ID NO: 391, SEQ ID NO: 393, SEQ ID NO: 395, SEQ ID NO: 397, SEQ ID NO: 399, SEQ ID NO: 401, SEQ ID NO: 403, SEQ ID NO: 405, SEQ ID NO: 407, SEQ ID NO: 409, SEQ ID NO: 411, SEQ ID NO: 413, SEQ ID NO: 415, SEQ ID NO: 417, SEQ ID NO: 419, SEQ ID NO: 421, SEQ ID NO: 423, SEQ ID NO: 425, SEQ ID NO: 427, SEQ ID NO: 429, SEQ ID NO: 431, SEQ ID NO: 433, SEQ ID NO: 435 or SEQ ID NO: 441;
[0341] e) nucleic acid molecule which comprises a polynucleotide, which is obtained by amplifying a cDNA library or a genomic library using the primers in SEQ ID NO: 58, SEQ ID NO: 59, SEQ ID NO: 60, SEQ ID NO: 61, SEQ ID NO: 62, SEQ ID NO: 63, SEQ ID NO: 144, SEQ ID NO: 145, SEQ ID NO: 221, SEQ ID NO: 222, SEQ ID NO: 244, SEQ ID NO: 245, SEQ ID NO: 436 or SEQ ID NO: 437;
[0342] f) nucleic acid molecule encoding a polypeptide, which is isolated with the aid of monoclonal and/or polyclonal antibodies against a polypeptide encoded by one of the nucleic acid molecules of (a) to (c) and having the biological activity represented by the protein as depicted in SEQ ID NO: 2, SEQ ID NO: 4, SEQ ID NO: 6, SEQ ID NO: 8, SEQ ID NO: 10, SEQ ID NO: 12, SEQ ID NO: 14, SEQ ID NO: 16, SEQ ID NO: 20, SEQ ID NO: 22, SEQ ID NO: 24, SEQ ID NO: 26, SEQ ID NO: 28, SEQ ID NO. 30, SEQ ID NO: 32; SEQ ID NO: 65, SEQ ID NO: 67, SEQ ID NO: 69, SEQ ID NO: 71, SEQ ID NO: 73, SEQ ID NO: 75, SEQ ID NO: 77, SEQ ID NO: 79, SEQ ID NO: 81, SEQ ID NO: 83, SEQ ID NO: 85, SEQ ID NO: 87, SEQ ID NO: 89, SEQ ID NO: 91, SEQ ID NO: 93, SEQ ID NO: 95, SEQ ID NO: 97, SEQ ID NO: 99, SEQ ID NO: 101, SEQ ID NO: 103, SEQ ID NO: 105, SEQ ID NO: 107, SEQ ID NO: 109, SEQ ID NO: 111, SEQ ID NO: 113, SEQ ID NO: 115, SEQ ID NO: 117, SEQ ID NO: 119, SEQ ID NO: 121, SEQ ID NO: 123, SEQ ID NO: 125, SEQ ID NO: 127, SEQ ID NO: 129, SEQ ID NO: 131, SEQ ID NO: 133, SEQ ID NO: 135, SEQ ID NO: 137, SEQ ID NO: 139, SEQ ID NO: 141, SEQ ID NO: 143, SEQ ID NO: 152, SEQ ID NO: 154, SEQ ID NO: 156, SEQ ID NO: 158, SEQ ID NO: 160, SEQ ID NO: 162, SEQ ID NO: 164, SEQ ID NO: 166, SEQ ID NO: 168, SEQ ID NO: 170, SEQ ID NO: 172, SEQ ID NO: 174, SEQ ID NO: 176, SEQ ID NO: 178, SEQ ID NO: 180, SEQ ID NO: 182, SEQ ID NO: 184, SEQ ID NO: 186, SEQ ID NO: 188, SEQ ID NO: 190, SEQ ID NO: 192, SEQ ID NO: 194, SEQ ID NO: 196, SEQ ID NO: 198, SEQ ID NO: 200, SEQ ID NO: 202, SEQ ID NO: 204, SEQ ID NO: 206, SEQ ID NO: 208, SEQ ID NO: 210, SEQ ID NO: 212, SEQ ID NO: 214, SEQ ID NO: 216, SEQ ID NO: 218, SEQ ID NO: 220, SEQ ID NO: 229, SEQ ID NO:231, SEQ ID NO:233, SEQ ID NO: 235, SEQ ID NO: 237, SEQ ID NO: 239, SEQ ID NO: 241, SEQ ID NO: 243, SEQ ID NO: 250, SEQ ID NO: 252, SEQ ID NO: 254, SEQ ID NO: 256, SEQ ID NO: 258, SEQ ID NO: 260, SEQ ID NO: 262, SEQ ID NO: 264, SEQ ID NO: 266, SEQ ID NO: 268, SEQ ID NO: 270, SEQ ID NO: 272, SEQ ID NO: 283, SEQ ID NO: 285, SEQ ID NO: 287, SEQ ID NO: 289, SEQ ID NO: 291, SEQ ID NO: 293, SEQ ID NO: 295, SEQ ID NO: 297, SEQ ID NO: 299, SEQ ID NO: 301, SEQ ID NO: 303, SEQ ID NO: 305, SEQ ID NO: 307, SEQ ID NO: 309, SEQ ID NO: 311, SEQ ID NO: 313, SEQ ID NO: 315, SEQ ID NO: 317, SEQ ID NO: 319, SEQ ID NO: 321, SEQ ID NO: 323, SEQ ID NO: 325, SEQ ID NO: 327, SEQ ID NO: 329, SEQ ID NO: 331, SEQ ID NO: 333, SEQ ID NO: 335, SEQ ID NO: 337, SEQ ID NO: 339, SEQ ID NO: 341, SEQ ID NO: 343, SEQ ID NO: 345, SEQ ID NO: 347, SEQ ID NO: 349, SEQ ID NO: 351, SEQ ID NO: 353, SEQ ID NO: 355, SEQ ID NO: 357, SEQ ID NO: 359, SEQ ID NO: 361, SEQ ID NO: 363, SEQ ID NO: 365, SEQ ID NO: 367, SEQ ID NO: 369, SEQ ID NO: 371, SEQ ID NO: 373, SEQ ID NO: 375, SEQ ID NO: 377, SEQ ID NO: 379, SEQ ID NO: 381, SEQ ID NO: 383, SEQ ID NO: 385, SEQ ID NO: 387, SEQ ID NO: 389, SEQ ID NO: 391, SEQ ID NO: 393, SEQ ID NO: 395, SEQ ID NO: 397, SEQ ID NO: 399, SEQ ID NO: 401, SEQ ID NO: 403, SEQ ID NO: 405, SEQ ID NO: 407, SEQ ID NO: 409, SEQ ID NO: 411, SEQ ID NO: 413, SEQ ID NO: 415, SEQ ID NO: 417, SEQ ID NO: 419, SEQ ID NO: 421, SEQ ID NO: 423, SEQ ID NO: 425, SEQ ID NO: 427, SEQ ID NO: 429, SEQ ID NO: 431, SEQ ID NO: 433, SEQ ID NO: 435 or SEQ ID NO: 441;
[0343] g) nucleic acid molecule encoding a polypeptide comprising the consensus sequence shown in SEQ ID NO: 33 or SEQ ID NO: 34 and having the biological activity represented by the protein as depicted in SEQ ID NO: 2, SEQ ID NO: 4, SEQ ID NO: 6, SEQ ID NO: 8, SEQ ID NO: 10, SEQ ID NO: 12, SEQ ID NO: 14, SEQ ID NO: 16, SEQ ID NO: 20, SEQ ID NO: 22, SEQ ID NO: 24, SEQ ID NO: 26, SEQ ID NO: 28, SEQ ID NO. 30, SEQ ID NO: 32; SEQ ID NO: 65, SEQ ID NO: 67, SEQ ID NO: 69, SEQ ID NO: 71, SEQ ID NO: 73, SEQ ID NO: 75, SEQ ID NO: 77, SEQ ID NO: 79, SEQ ID NO: 81, SEQ ID NO: 83, SEQ ID NO: 85, SEQ ID NO: 87, SEQ ID NO: 89, SEQ ID NO: 91, SEQ ID NO: 93, SEQ ID NO: 95, SEQ ID NO: 97, SEQ ID NO: 99, SEQ ID NO: 101, SEQ ID NO: 103, SEQ ID NO: 105, SEQ ID NO: 107, SEQ ID NO: 109, SEQ ID NO: 111, SEQ ID NO: 113, SEQ ID NO: 115, SEQ ID NO: 117, SEQ ID NO: 119, SEQ ID NO: 121, SEQ ID NO: 123, SEQ ID NO: 125, SEQ ID NO: 127, SEQ ID NO: 129, SEQ ID NO: 131, SEQ ID NO: 133, SEQ ID NO: 135, SEQ ID NO: 137, SEQ ID NO: 139, SEQ ID NO: 141, SEQ ID NO: 143, SEQ ID NO: 152, SEQ ID NO: 154, SEQ ID NO: 156, SEQ ID NO: 158, SEQ ID NO: 160, SEQ ID NO: 162, SEQ ID NO: 164, SEQ ID NO: 166, SEQ ID NO: 168, SEQ ID NO: 170, SEQ ID NO: 172, SEQ ID NO: 174, SEQ ID NO: 176, SEQ ID NO: 178, SEQ ID NO: 180, SEQ ID NO: 182, SEQ ID NO: 184, SEQ ID NO: 186, SEQ ID NO: 188, SEQ ID NO: 190, SEQ ID NO: 192, SEQ ID NO: 194, SEQ ID NO: 196, SEQ ID NO: 198, SEQ ID NO: 200, SEQ ID NO: 202, SEQ ID NO: 204, SEQ ID NO: 206, SEQ ID NO: 208, SEQ ID NO: 210, SEQ ID NO: 212, SEQ ID NO: 214, SEQ ID NO: 216, SEQ ID NO: 218, SEQ ID NO: 220, SEQ ID NO: 229, SEQ ID NO:231, SEQ ID NO:233, SEQ ID NO: 235, SEQ ID NO: 237, SEQ ID NO: 239, SEQ ID NO: 241, SEQ ID NO: 243, SEQ ID NO: 250, SEQ ID NO: 252, SEQ ID NO: 254, SEQ ID NO: 256, SEQ ID NO: 258, SEQ ID NO: 260, SEQ ID NO: 262, SEQ ID NO: 264, SEQ ID NO: 266, SEQ ID NO: 268, SEQ ID NO: 270, SEQ ID NO: 272, SEQ ID NO: 283, SEQ ID NO: 285, SEQ ID NO: 287, SEQ ID NO: 289, SEQ ID NO: 291, SEQ ID NO: 293, SEQ ID NO: 295, SEQ ID NO: 297, SEQ ID NO: 299, SEQ ID NO: 301, SEQ ID NO: 303, SEQ ID NO: 305, SEQ ID NO: 307, SEQ ID NO: 309, SEQ ID NO: 311, SEQ ID NO: 313, SEQ ID NO: 315, SEQ ID NO: 317, SEQ ID NO: 319, SEQ ID NO: 321, SEQ ID NO: 323, SEQ ID NO: 325, SEQ ID NO: 327, SEQ ID NO: 329, SEQ ID NO: 331, SEQ ID NO: 333, SEQ ID NO: 335, SEQ ID NO: 337, SEQ ID NO: 339, SEQ ID NO: 341, SEQ ID NO: 343, SEQ ID NO: 345, SEQ ID NO: 347, SEQ ID NO: 349, SEQ ID NO: 351, SEQ ID NO: 353, SEQ ID NO: 355, SEQ ID NO: 357, SEQ ID NO: 359, SEQ ID NO: 361, SEQ ID NO: 363, SEQ ID NO: 365, SEQ ID NO: 367, SEQ ID NO: 369, SEQ ID NO: 371, SEQ ID NO: 373, SEQ ID NO: 375, SEQ ID NO: 377, SEQ ID NO: 379, SEQ ID NO: 381, SEQ ID NO: 383, SEQ ID NO: 385, SEQ ID NO: 387, SEQ ID NO: 389, SEQ ID NO: 391, SEQ ID NO: 393, SEQ ID NO: 395, SEQ ID NO: 397, SEQ ID NO: 399, SEQ ID NO: 401, SEQ ID NO: 403, SEQ ID NO: 405, SEQ ID NO: 407, SEQ ID NO: 409, SEQ ID NO: 411, SEQ ID NO: 413, SEQ ID NO: 415, SEQ ID NO: 417, SEQ ID NO: 419, SEQ ID NO: 421, SEQ ID NO: 423, SEQ ID NO: 425, SEQ ID NO: 427, SEQ ID NO: 429, SEQ ID NO: 431, SEQ ID NO: 433, SEQ ID NO: 435 or SEQ ID NO: 441;
[0344] h) nucleic acid molecule encoding a polypeptide having the biological activity represented by the protein as depicted in SEQ ID NO: 2, SEQ ID NO: 4, SEQ ID NO: 6, SEQ ID NO: 8, SEQ ID NO: 10, SEQ ID NO: 12, SEQ ID NO: 14, SEQ ID NO: 16, SEQ ID NO: 20, SEQ ID NO: 22, SEQ ID NO: 24, SEQ ID NO: 26, SEQ ID NO: 28, SEQ ID NO. 30, SEQ ID NO: 32; SEQ ID NO: 65, SEQ ID NO: 67, SEQ ID NO: 69, SEQ ID NO: 71, SEQ ID NO: 73, SEQ ID NO: 75, SEQ ID NO: 77, SEQ ID NO: 79, SEQ ID NO: 81, SEQ ID NO: 83, SEQ ID NO: 85, SEQ ID NO: 87, SEQ ID NO: 89, SEQ ID NO: 91, SEQ ID NO: 93, SEQ ID NO: 95, SEQ ID NO: 97, SEQ ID NO: 99, SEQ ID NO: 101, SEQ ID NO: 103, SEQ ID NO: 105, SEQ ID NO: 107, SEQ ID NO: 109, SEQ ID NO: 111, SEQ ID NO: 113, SEQ ID NO: 115, SEQ ID NO: 117, SEQ ID NO: 119, SEQ ID NO: 121, SEQ ID NO: 123, SEQ ID NO: 125, SEQ ID NO: 127, SEQ ID NO: 129, SEQ ID NO: 131, SEQ ID NO: 133, SEQ ID NO: 135, SEQ ID NO: 137, SEQ ID NO: 139, SEQ ID NO: 141, SEQ ID NO: 143, SEQ ID NO: 152, SEQ ID NO: 154, SEQ ID NO: 156, SEQ ID NO: 158, SEQ ID NO: 160, SEQ ID NO: 162, SEQ ID NO: 164, SEQ ID NO: 166, SEQ ID NO: 168, SEQ ID NO: 170, SEQ ID NO: 172, SEQ ID NO: 174, SEQ ID NO: 176, SEQ ID NO: 178, SEQ ID NO: 180, SEQ ID NO: 182, SEQ ID NO: 184, SEQ ID NO: 186, SEQ ID NO: 188, SEQ ID NO: 190, SEQ ID NO: 192, SEQ ID NO: 194, SEQ ID NO: 196, SEQ ID NO: 198, SEQ ID NO: 200, SEQ ID NO: 202, SEQ ID NO: 204, SEQ ID NO: 206, SEQ ID NO: 208, SEQ ID NO: 210, SEQ ID NO: 212, SEQ ID NO: 214, SEQ ID NO: 216, SEQ ID NO: 218, SEQ ID NO: 220, SEQ ID NO: 229, SEQ ID NO:231, SEQ ID NO:233, SEQ ID NO: 235, SEQ ID NO: 237, SEQ ID NO: 239, SEQ ID NO: 241, SEQ ID NO: 243, SEQ ID NO: 250, SEQ ID NO: 252, SEQ ID NO: 254, SEQ ID NO: 256, SEQ ID NO: 258, SEQ ID NO: 260, SEQ ID NO: 262, SEQ ID NO: 264, SEQ ID NO: 266, SEQ ID NO: 268, SEQ ID NO: 270, SEQ ID NO: 272, SEQ ID NO: 283, SEQ ID NO: 285, SEQ ID NO: 287, SEQ ID NO: 289, SEQ ID NO: 291, SEQ ID NO: 293, SEQ ID NO: 295, SEQ ID NO: 297, SEQ ID NO: 299, SEQ ID NO: 301, SEQ ID NO: 303, SEQ ID NO: 305, SEQ ID NO: 307, SEQ ID NO: 309, SEQ ID NO: 311, SEQ ID NO: 313, SEQ ID NO: 315, SEQ ID NO: 317, SEQ ID NO: 319, SEQ ID NO: 321, SEQ ID NO: 323, SEQ ID NO: 325, SEQ ID NO: 327, SEQ ID NO: 329, SEQ ID NO: 331, SEQ ID NO: 333, SEQ ID NO: 335, SEQ ID NO: 337, SEQ ID NO: 339, SEQ ID NO: 341, SEQ ID NO: 343, SEQ ID NO: 345, SEQ ID NO: 347, SEQ ID NO: 349, SEQ ID NO: 351, SEQ ID NO: 353, SEQ ID NO: 355, SEQ ID NO: 357, SEQ ID NO: 359, SEQ ID NO: 361, SEQ ID NO: 363, SEQ ID NO: 365, SEQ ID NO: 367, SEQ ID NO: 369, SEQ ID NO: 371, SEQ ID NO: 373, SEQ ID NO: 375, SEQ ID NO: 377, SEQ ID NO: 379, SEQ ID NO: 381, SEQ ID NO: 383, SEQ ID NO: 385, SEQ ID NO: 387, SEQ ID NO: 389, SEQ ID NO: 391, SEQ ID NO: 393, SEQ ID NO: 395, SEQ ID NO: 397, SEQ ID NO: 399, SEQ ID NO: 401, SEQ ID NO: 403, SEQ ID NO: 405, SEQ ID NO: 407, SEQ ID NO: 409, SEQ ID NO: 411, SEQ ID NO: 413, SEQ ID NO: 415, SEQ ID NO: 417, SEQ ID NO: 419, SEQ ID NO: 421, SEQ ID NO: 423, SEQ ID NO: 425, SEQ ID NO: 427, SEQ ID NO: 429, SEQ ID NO: 431, SEQ ID NO: 433, SEQ ID NO: 435 or SEQ ID NO: 441;
[0345] i) nucleic acid molecule which is obtainable by screening a suitable library under stringent hybridisation conditions with a probe comprising one of the sequences of the nucleic acid molecule of (a) to (c) or with a fragment of at least 15 nt, preferably 20 nt, 30 nt, 50 nt, 100 nt, 200 nt or 500 nt of the nucleic acid molecule characterized in (a) to (i) and encoding a polypeptide having the biological activity represented by the protein as depicted in SEQ ID NO: 2, SEQ ID NO: 4, SEQ ID NO: 6, SEQ ID NO: 8, SEQ ID NO: 10, SEQ ID NO: 12, SEQ ID NO: 14, SEQ ID NO: 16, SEQ ID NO: 20, SEQ ID NO: 22, SEQ ID NO: 24, SEQ ID NO: 26, SEQ ID NO: 28, SEQ ID NO. 30, SEQ ID NO: 32; SEQ ID NO: 65, SEQ ID NO: 67, SEQ ID NO: 69, SEQ ID NO: 71, SEQ ID NO: 73, SEQ ID NO: 75, SEQ ID NO: 77, SEQ ID NO: 79, SEQ ID NO: 81, SEQ ID NO: 83, SEQ ID NO: 85, SEQ ID NO: 87, SEQ ID NO: 89, SEQ ID NO: 91, SEQ ID NO: 93, SEQ ID NO: 95, SEQ ID NO: 97, SEQ ID NO: 99, SEQ ID NO: 101, SEQ ID NO: 103, SEQ ID NO: 105, SEQ ID NO: 107, SEQ ID NO: 109, SEQ ID NO: 111, SEQ ID NO: 113, SEQ ID NO: 115, SEQ ID NO: 117, SEQ ID NO: 119, SEQ ID NO: 121, SEQ ID NO: 123, SEQ ID NO: 125, SEQ ID NO: 127, SEQ ID NO: 129, SEQ ID NO: 131, SEQ ID NO: 133, SEQ ID NO: 135, SEQ ID NO: 137, SEQ ID NO: 139, SEQ ID NO: 141, SEQ ID NO: 143, SEQ ID NO: 152, SEQ ID NO: 154, SEQ ID NO: 156, SEQ ID NO: 158, SEQ ID NO: 160, SEQ ID NO: 162, SEQ ID NO: 164, SEQ ID NO: 166, SEQ ID NO: 168, SEQ ID NO: 170, SEQ ID NO: 172, SEQ ID NO: 174, SEQ ID NO: 176, SEQ ID NO: 178, SEQ ID NO: 180, SEQ ID NO: 182, SEQ ID NO: 184, SEQ ID NO: 186, SEQ ID NO: 188, SEQ ID NO: 190, SEQ ID NO: 192, SEQ ID NO: 194, SEQ ID NO: 196, SEQ ID NO: 198, SEQ ID NO: 200, SEQ ID NO: 202, SEQ ID NO: 204, SEQ ID NO: 206, SEQ ID NO: 208, SEQ ID NO: 210, SEQ ID NO: 212, SEQ ID NO: 214, SEQ ID NO: 216, SEQ ID NO: 218, SEQ ID NO: 220, SEQ ID NO: 229, SEQ ID NO:231, SEQ ID NO:233, SEQ ID NO: 235, SEQ ID NO: 237, SEQ ID NO: 239, SEQ ID NO: 241, SEQ ID NO: 243, SEQ ID NO: 250, SEQ ID NO: 252, SEQ ID NO: 254, SEQ ID NO: 256, SEQ ID NO: 258, SEQ ID NO: 260, SEQ ID NO: 262, SEQ ID NO: 264, SEQ ID NO: 266, SEQ ID NO: 268, SEQ ID NO: 270, SEQ ID NO: 272, SEQ ID NO: 283, SEQ ID NO: 285, SEQ ID NO: 287, SEQ ID NO: 289, SEQ ID NO: 291, SEQ ID NO: 293, SEQ ID NO: 295, SEQ ID NO: 297, SEQ ID NO: 299, SEQ ID NO: 301, SEQ ID NO: 303, SEQ ID NO: 305, SEQ ID NO: 307, SEQ ID NO: 309, SEQ ID NO: 311, SEQ ID NO: 313, SEQ ID NO: 315, SEQ ID NO: 317, SEQ ID NO: 319, SEQ ID NO: 321, SEQ ID NO: 323, SEQ ID NO: 325, SEQ ID NO: 327, SEQ ID NO: 329, SEQ ID NO: 331, SEQ ID NO: 333, SEQ ID NO: 335, SEQ ID NO: 337, SEQ ID NO: 339, SEQ ID NO: 341, SEQ ID NO: 343, SEQ ID NO: 345, SEQ ID NO: 347, SEQ ID NO: 349, SEQ ID NO: 351, SEQ ID NO: 353, SEQ ID NO: 355, SEQ ID NO: 357, SEQ ID NO: 359, SEQ ID NO: 361, SEQ ID NO: 363, SEQ ID NO: 365, SEQ ID NO: 367, SEQ ID NO: 369, SEQ ID NO: 371, SEQ ID NO: 373, SEQ ID NO: 375, SEQ ID NO: 377, SEQ ID NO: 379, SEQ ID NO: 381, SEQ ID NO: 383, SEQ ID NO: 385, SEQ ID NO: 387, SEQ ID NO: 389, SEQ ID NO: 391, SEQ ID NO: 393, SEQ ID NO: 395, SEQ ID NO: 397, SEQ ID NO: 399, SEQ ID NO: 401, SEQ ID NO: 403, SEQ ID NO: 405, SEQ ID NO: 407, SEQ ID NO: 409, SEQ ID NO: 411, SEQ ID NO: 413, SEQ ID NO: 415, SEQ ID NO: 417, SEQ ID NO: 419, SEQ ID NO: 421, SEQ ID NO: 423, SEQ ID NO: 425, SEQ ID NO: 427, SEQ ID NO: 429, SEQ ID NO: 431, SEQ ID NO: 433, SEQ ID NO: 435 or SEQ ID NO: 441; or which comprises a sequence which is complementary thereto; whereby the nucleic acid molecule according to (a) to (j) is at least in one or more nucleotides different from the sequence depicted in SEQ ID NO: 1, SEQ ID NO: 3, SEQ ID NO: 5, SEQ ID NO: 7, SEQ ID NO: 9, SEQ ID NO: 11, SEQ ID NO: 13, SEQ ID NO: 15, SEQ ID NO: 19, SEQ ID NO: 21, SEQ ID NO: 23, SEQ ID NO: 25, SEQ ID NO: 27, SEQ ID NO: 29, SEQ ID NO: 31; SEQ ID NO: 64, SEQ ID NO: 66, SEQ ID NO: 68, SEQ ID NO: 70, SEQ ID NO: 72, SEQ ID NO: 74, SEQ ID NO: 76, SEQ ID NO: 78, SEQ ID NO: 80, SEQ ID NO: 82, SEQ ID NO: 84, SEQ ID NO: 86, SEQ ID NO: 88, SEQ ID NO: 90, SEQ ID NO: 92, SEQ ID NO: 94, SEQ ID NO: 96, SEQ ID NO: 98, SEQ ID NO: 100, SEQ ID NO: 102, SEQ ID NO: 104, SEQ ID NO: 106, SEQ ID NO: 108, SEQ ID NO: 110, SEQ ID NO: 112, SEQ ID NO: 114, SEQ ID NO: 116, SEQ ID NO: 118, SEQ ID NO: 120, SEQ ID NO: 122, SEQ ID NO: 124, SEQ ID NO: 126, SEQ ID NO: 128, SEQ ID NO: 130, SEQ ID NO: 132, SEQ ID NO: 134, SEQ ID NO: 136, SEQ ID NO: 138, SEQ ID NO: 140, SEQ ID NO: , SEQ ID NO: 142, SEQ ID NO: 151, SEQ ID NO: 153, SEQ ID NO: 155, SEQ ID NO: 157, SEQ ID NO: 159, SEQ ID NO: 161, SEQ ID NO: 163, SEQ ID NO: 165, SEQ ID NO: 167, SEQ ID NO: 169, SEQ ID NO: 171, SEQ ID NO: 173, SEQ ID NO: 175, SEQ ID NO: 177, SEQ ID NO: 179, SEQ ID NO: 181, SEQ ID NO: 183, SEQ ID NO: 185, SEQ ID NO: 187, SEQ ID NO: 189, SEQ ID NO: 191, SEQ ID NO: 193, SEQ ID NO: 195, SEQ ID NO: 197, SEQ ID NO: 199, SEQ ID NO: 201, SEQ ID NO: 203, SEQ ID NO: 205, SEQ ID NO: 207, SEQ ID NO: 209, SEQ ID NO: 211, SEQ ID NO: 213, SEQ ID NO: 215, SEQ ID NO: 217, SEQ ID NO: 219, SEQ ID NO: 228, SEQ ID NO: 230, SEQ ID NO: 232, SEQ ID NO: 234, SEQ ID NO: 236, SEQ ID NO: 238, SEQ ID NO: 240, SEQ ID NO: 242, SEQ ID NO: 249, SEQ ID NO: 251, SEQ ID NO: 253, SEQ ID NO: 255, SEQ ID NO: 257, SEQ ID NO: 259, SEQ ID NO: 261, SEQ ID NO: 263, SEQ ID NO: 265, SEQ ID NO: 267, SEQ ID NO: 269, SEQ ID NO: 271, SEQ ID NO: 282, SEQ ID NO: 284, SEQ ID NO: 286, SEQ ID NO: 288, SEQ ID NO: 290, SEQ ID NO: 292, SEQ ID NO: 294, SEQ ID NO: 296, SEQ ID NO: 298, SEQ ID NO: 300, SEQ ID NO: 302, SEQ ID NO: 304, SEQ ID NO: 306, SEQ ID NO: 308, SEQ ID NO: 310, SEQ ID NO: 312, SEQ ID NO: 314, SEQ ID NO: 316, SEQ ID NO: 318, SEQ ID NO: 320, SEQ ID NO: 322, SEQ ID NO: 324, SEQ ID NO: 326, SEQ ID NO: 328, SEQ ID NO: 330, SEQ ID NO: 332, SEQ ID NO: 334, SEQ ID NO: 336, SEQ ID NO: 338, SEQ ID NO: 340, SEQ ID NO: 342, SEQ ID NO: 344, SEQ ID NO: 346, SEQ ID NO: 348, SEQ ID NO: 350, SEQ ID NO: 352, SEQ ID NO: 354, SEQ ID NO: 356, SEQ ID NO: 358, SEQ ID NO: 360, SEQ ID NO: 362, SEQ ID NO: 364, SEQ ID NO: 366, SEQ ID NO: 368, SEQ ID NO: 370, SEQ ID NO: 372, SEQ ID NO: 374, SEQ ID NO: 376, SEQ ID NO: 378, SEQ ID NO: 380, SEQ ID NO: 382, SEQ ID NO: 384, SEQ ID NO: 386, SEQ ID NO: 388, SEQ ID NO: 390, SEQ ID NO: 392, SEQ ID NO: 394, SEQ ID NO: 396, SEQ ID NO: 398, SEQ ID NO: 400, SEQ ID NO: 402, SEQ ID NO: 404, SEQ ID NO: 406, SEQ ID NO: 408, SEQ ID NO: 410, SEQ ID NO: 412, SEQ ID NO: 414, SEQ ID NO: 416, SEQ ID NO: 418, SEQ ID NO: 420, SEQ ID NO: 422, SEQ ID NO: 424, SEQ ID NO: 426, SEQ ID NO: 428, SEQ ID NO: 430, SEQ ID NO: 432, SEQ ID NO: 434 or SEQ ID NO: 440 and/or which encodes a protein which differs at least in one, two, three, four, five, six, seven, eight, nine, ten or more amino acids from the protein sequences depicted in SEQ ID NO: 2, SEQ ID NO: 4, SEQ ID NO: 6, SEQ ID NO: 8, SEQ ID NO: 10, SEQ ID NO: 12, SEQ ID NO: 14, SEQ ID NO: 16, SEQ ID NO: 20, SEQ ID NO: 22, SEQ ID NO: 24, SEQ ID NO: 26, SEQ ID NO: 28, SEQ ID NO. 30, SEQ ID NO: 32; SEQ ID NO: 65, SEQ ID NO: 67, SEQ ID NO: 69, SEQ ID NO: 71, SEQ ID NO: 73, SEQ ID NO: 75, SEQ ID NO: 77, SEQ ID NO: 79, SEQ ID NO: 81, SEQ ID NO: 83, SEQ ID NO: 85, SEQ ID NO: 87, SEQ ID NO: 89, SEQ ID NO: 91, SEQ ID NO: 93, SEQ ID NO: 95, SEQ ID NO: 97, SEQ ID NO: 99, SEQ ID NO: 101, SEQ ID NO: 103, SEQ ID NO: 105, SEQ ID NO: 107, SEQ ID NO: 109, SEQ ID NO: 111, SEQ ID NO: 113, SEQ ID NO: 115, SEQ ID NO: 117, SEQ ID NO: 119, SEQ ID NO: 121, SEQ ID NO: 123, SEQ ID NO: 125, SEQ ID NO: 127, SEQ ID NO: 129, SEQ ID NO: 131, SEQ ID NO: 133, SEQ ID NO: 135, SEQ ID NO: 137, SEQ ID NO: 139, SEQ ID NO: 141, SEQ ID NO: 143, SEQ ID NO: 152, SEQ ID NO: 154, SEQ ID NO: 156, SEQ ID NO: 158, SEQ ID NO: 160, SEQ ID NO: 162, SEQ ID NO: 164, SEQ ID NO: 166, SEQ ID NO: 168, SEQ ID NO: 170, SEQ ID NO: 172, SEQ ID NO: 174, SEQ ID NO: 176, SEQ ID NO: 178, SEQ ID NO: 180, SEQ ID NO: 182, SEQ ID NO: 184, SEQ ID NO: 186, SEQ ID NO: 188, SEQ ID NO: 190, SEQ ID NO: 192, SEQ ID NO: 194, SEQ ID NO: 196, SEQ ID NO: 198, SEQ ID NO: 200, SEQ ID NO: 202, SEQ ID NO: 204, SEQ ID NO: 206, SEQ ID NO: 208, SEQ ID NO: 210, SEQ ID NO: 212, SEQ ID NO: 214, SEQ ID NO: 216, SEQ ID NO: 218, SEQ ID NO: 220, SEQ ID NO: 229, SEQ ID NO:231, SEQ ID NO:233, SEQ ID NO: 235, SEQ ID NO: 237, SEQ ID NO: 239, SEQ ID NO: 241, SEQ ID NO: 243, SEQ ID NO: 250, SEQ ID NO: 252, SEQ ID NO: 254, SEQ ID NO: 256, SEQ ID NO: 258, SEQ ID NO: 260, SEQ ID NO: 262, SEQ ID NO: 264, SEQ ID NO: 266, SEQ ID NO: 268, SEQ ID NO: 270, SEQ ID NO: 272, SEQ ID NO: 283, SEQ ID NO: 285, SEQ ID NO: 287, SEQ ID NO: 289, SEQ ID NO: 291, SEQ ID NO: 293, SEQ ID NO: 295, SEQ ID NO: 297, SEQ ID NO: 299, SEQ ID NO: 301, SEQ ID NO: 303, SEQ ID NO: 305, SEQ ID NO: 307, SEQ ID NO: 309, SEQ ID NO: 311, SEQ ID NO: 313, SEQ ID NO: 315, SEQ ID NO: 317, SEQ ID NO: 319, SEQ ID NO: 321, SEQ ID NO: 323, SEQ ID NO: 325, SEQ ID NO: 327, SEQ ID NO: 329, SEQ ID NO: 331, SEQ ID NO: 333, SEQ ID NO: 335, SEQ ID NO: 337, SEQ ID NO: 339, SEQ ID NO: 341, SEQ ID NO: 343, SEQ ID NO: 345, SEQ ID NO: 347, SEQ ID NO: 349, SEQ ID NO: 351, SEQ ID NO: 353, SEQ ID NO: 355, SEQ ID NO: 357, SEQ ID NO: 359, SEQ ID NO: 361, SEQ ID NO: 363, SEQ ID NO: 365, SEQ ID NO: 367, SEQ ID NO: 369, SEQ ID NO: 371, SEQ ID NO: 373, SEQ ID NO: 375, SEQ ID NO: 377, SEQ ID NO: 379, SEQ ID NO: 381, SEQ ID NO: 383, SEQ ID NO: 385, SEQ ID NO: 387, SEQ ID NO: 389, SEQ ID NO: 391, SEQ ID NO: 393, SEQ ID NO: 395, SEQ ID NO: 397, SEQ ID NO: 399, SEQ ID NO: 401, SEQ ID NO: 403, SEQ ID NO: 405, SEQ ID NO: 407, SEQ ID NO: 409, SEQ ID NO: 411, SEQ ID NO: 413, SEQ ID NO: 415, SEQ ID NO: 417, SEQ ID NO: 419, SEQ ID NO: 421, SEQ ID NO: 423, SEQ ID NO: 425, SEQ ID NO: 427, SEQ ID NO: 429, SEQ ID NO: 431, SEQ ID NO: 433, SEQ ID NO: 435 or SEQ ID NO: 441. In another embodiment, the nucleic acid molecule depicted in SEQ ID NO: 1, SEQ ID NO: 3, SEQ ID NO: 5, SEQ ID NO: 7, SEQ ID NO: 9, SEQ ID NO: 11, SEQ ID NO: 13, SEQ ID NO: 15, SEQ ID NO: 19, SEQ ID NO: 21, SEQ ID NO: 23, SEQ ID NO: 25, SEQ ID NO: 27, SEQ ID NO: 29, SEQ ID NO: 31; SEQ ID NO: 64, SEQ ID NO: 66, SEQ ID NO: 68, SEQ ID NO: 70, SEQ ID NO: 72, SEQ ID NO: 74, SEQ ID NO: 76, SEQ ID NO: 78, SEQ ID NO: 80, SEQ ID NO: 82, SEQ ID NO: 84, SEQ ID NO: 86, SEQ ID NO: 88, SEQ ID NO: 90, SEQ ID NO: 92, SEQ ID NO: 94, SEQ ID NO: 96, SEQ ID NO: 98, SEQ ID NO: 100, SEQ ID NO: 102, SEQ ID NO: 104, SEQ ID NO: 106, SEQ ID NO: 108, SEQ ID NO: 110, SEQ ID NO: 112, SEQ ID NO: 114, SEQ ID NO: 116, SEQ ID NO: 118, SEQ ID NO: 120, SEQ ID NO: 122, SEQ ID NO: 124, SEQ ID NO: 126, SEQ ID NO: 128, SEQ ID NO: 130, SEQ ID NO: 132, SEQ ID NO: 134, SEQ ID NO: 136, SEQ ID NO: 138, SEQ ID NO: 140, SEQ ID NO: , SEQ ID NO: 142, SEQ ID NO: 151, SEQ ID NO: 153, SEQ ID NO: 155, SEQ ID NO: 157, SEQ ID NO: 159, SEQ ID NO: 161, SEQ ID NO: 163, SEQ ID NO: 165, SEQ ID NO: 167, SEQ ID NO: 169, SEQ ID NO: 171, SEQ ID NO: 173, SEQ ID NO: 175, SEQ ID NO: 177, SEQ ID NO: 179, SEQ ID NO: 181, SEQ ID NO: 183, SEQ ID NO: 185, SEQ ID NO: 187, SEQ ID NO: 189, SEQ ID NO: 191, SEQ ID NO: 193, SEQ ID NO: 195, SEQ ID NO: 197, SEQ ID NO: 199, SEQ ID NO: 201, SEQ ID NO: 203, SEQ ID NO: 205, SEQ ID NO: 207, SEQ ID NO: 209, SEQ ID NO: 211, SEQ ID NO: 213, SEQ ID NO: 215, SEQ ID NO: 217, SEQ ID NO: 219, SEQ ID NO: 228, SEQ ID NO: 230, SEQ ID NO: 232, SEQ ID NO: 234, SEQ ID NO: 236, SEQ ID NO: 238, SEQ ID NO: 240, SEQ ID NO: 242, SEQ ID NO: 249, SEQ ID NO: 251, SEQ ID NO: 253, SEQ ID NO: 255, SEQ ID NO: 257, SEQ ID NO: 259, SEQ ID NO: 261, SEQ ID NO: 263, SEQ ID NO: 265, SEQ ID NO: 267, SEQ ID NO: 269, SEQ ID NO: 271, SEQ ID NO: 282, SEQ ID NO: 284, SEQ ID NO: 286, SEQ ID NO: 288, SEQ ID NO: 290, SEQ ID NO: 292, SEQ ID NO: 294, SEQ ID NO: 296, SEQ ID NO: 298, SEQ ID NO: 300, SEQ ID NO: 302, SEQ ID NO: 304, SEQ ID NO: 306, SEQ ID NO: 308, SEQ ID NO: 310, SEQ ID NO: 312, SEQ ID NO: 314, SEQ ID NO: 316, SEQ ID NO: 318, SEQ ID NO: 320, SEQ ID NO: 322, SEQ ID NO: 324, SEQ ID NO: 326, SEQ ID NO: 328, SEQ ID NO: 330, SEQ ID NO: 332, SEQ ID NO: 334, SEQ ID NO: 336, SEQ ID NO: 338, SEQ ID NO: 340, SEQ ID NO: 342, SEQ ID NO: 344, SEQ ID NO: 346, SEQ ID NO: 348, SEQ ID NO: 350, SEQ ID NO: 352, SEQ ID NO: 354, SEQ ID NO: 356, SEQ ID NO: 358, SEQ ID NO: 360, SEQ ID NO: 362, SEQ ID NO: 364, SEQ ID NO: 366, SEQ ID NO: 368, SEQ ID NO: 370, SEQ ID NO: 372, SEQ ID NO: 374, SEQ ID NO: 376, SEQ ID NO: 378, SEQ ID NO: 380, SEQ ID NO: 382, SEQ ID NO: 384, SEQ ID NO: 386, SEQ ID NO: 388, SEQ ID NO: 390, SEQ ID NO: 392, SEQ ID NO: 394, SEQ ID NO: 396, SEQ ID NO: 398, SEQ ID NO: 400, SEQ ID NO: 402, SEQ ID NO: 404, SEQ ID NO: 406, SEQ ID NO: 408, SEQ ID NO: 410, SEQ ID NO: 412, SEQ ID NO: 414, SEQ ID NO: 416, SEQ ID NO: 418, SEQ ID NO: 420, SEQ ID NO: 422, SEQ ID NO: 424, SEQ ID NO: 426, SEQ ID NO: 428, SEQ ID NO: 430, SEQ ID NO: 432, SEQ ID NO: 434 or SEQ ID NO: 440 does not consist of the sequence shown in SEQ ID NO: 1, SEQ ID NO: 3, SEQ ID NO: 5, SEQ ID NO: 7, SEQ ID NO: 9, SEQ ID NO: 11, SEQ ID NO: 13, SEQ ID NO: 15, SEQ ID NO: 19, SEQ ID NO: 21, SEQ ID NO: 23, SEQ ID NO: 25, SEQ ID NO: 27, SEQ ID NO: 29, SEQ ID NO: 31; SEQ ID NO: 64, SEQ ID NO: 66, SEQ ID NO: 68, SEQ ID NO: 70, SEQ ID NO: 72, SEQ ID NO: 74, SEQ ID NO: 76, SEQ ID NO: 78, SEQ ID NO: 80, SEQ ID NO: 82, SEQ ID NO: 84, SEQ ID NO: 86, SEQ ID NO: 88, SEQ ID NO: 90, SEQ ID NO: 92, SEQ ID NO: 94, SEQ ID NO: 96, SEQ ID NO: 98, SEQ ID NO: 100, SEQ ID NO: 102, SEQ ID NO: 104, SEQ ID NO: 106, SEQ ID NO: 108, SEQ ID NO: 110, SEQ ID NO: 112, SEQ ID NO: 114, SEQ ID NO: 116, SEQ ID NO: 118, SEQ ID NO: 120, SEQ ID NO: 122, SEQ ID NO: 124, SEQ ID NO: 126, SEQ ID NO: 128, SEQ ID NO: 130, SEQ ID NO: 132, SEQ ID NO: 134, SEQ ID NO: 136, SEQ ID NO: 138, SEQ ID NO: 140, SEQ ID NO: , SEQ ID NO: 142, SEQ ID NO: 151, SEQ ID NO: 153, SEQ ID NO: 155, SEQ ID NO: 157, SEQ ID NO: 159, SEQ ID NO: 161, SEQ ID NO: 163, SEQ ID NO: 165, SEQ ID NO: 167, SEQ ID NO: 169, SEQ ID NO: 171, SEQ ID NO: 173, SEQ ID NO: 175, SEQ ID NO: 177, SEQ ID NO: 179, SEQ ID NO: 181, SEQ ID NO: 183, SEQ ID NO: 185, SEQ ID NO: 187, SEQ ID NO: 189, SEQ ID NO: 191, SEQ ID NO: 193, SEQ ID NO: 195, SEQ ID NO: 197, SEQ ID NO: 199, SEQ ID NO: 201, SEQ ID NO: 203, SEQ ID NO: 205, SEQ ID NO: 207, SEQ ID NO: 209, SEQ ID NO: 211, SEQ ID NO: 213, SEQ ID NO: 215, SEQ ID NO: 217, SEQ ID NO: 219, SEQ ID NO: 228, SEQ ID NO: 230, SEQ ID NO: 232, SEQ ID NO: 234, SEQ ID NO: 236, SEQ ID NO: 238, SEQ ID NO: 240, SEQ ID NO: 242, SEQ ID NO: 249, SEQ ID NO: 251, SEQ ID NO: 253, SEQ ID NO: 255, SEQ ID NO: 257, SEQ ID NO: 259, SEQ ID NO: 261, SEQ ID NO: 263, SEQ ID NO: 265, SEQ ID NO: 267, SEQ ID NO: 269, SEQ ID NO: 271, SEQ ID NO: 282, SEQ ID NO: 284, SEQ ID NO: 286, SEQ ID NO: 288, SEQ ID NO: 290, SEQ ID NO: 292, SEQ ID NO: 294, SEQ ID NO: 296, SEQ ID NO: 298, SEQ ID NO: 300, SEQ ID NO: 302, SEQ ID NO: 304, SEQ ID NO: 306, SEQ ID NO: 308, SEQ ID NO: 310, SEQ ID NO: 312, SEQ ID NO: 314, SEQ ID NO: 316, SEQ ID NO: 318, SEQ ID NO: 320, SEQ ID NO: 322, SEQ ID NO: 324, SEQ ID NO: 326, SEQ ID NO: 328, SEQ ID NO: 330, SEQ ID NO: 332, SEQ ID NO: 334, SEQ ID NO: 336, SEQ ID NO: 338, SEQ ID NO: 340, SEQ ID NO: 342, SEQ ID NO: 344, SEQ ID NO: 346, SEQ ID NO: 348, SEQ ID NO: 350, SEQ ID NO: 352, SEQ ID NO: 354, SEQ ID NO: 356, SEQ ID NO: 358, SEQ ID NO: 360, SEQ ID NO: 362, SEQ ID NO: 364, SEQ ID NO: 366, SEQ ID NO: 368, SEQ ID NO: 370, SEQ ID NO: 372, SEQ ID NO: 374, SEQ ID NO: 376, SEQ ID NO: 378, SEQ ID NO: 380, SEQ ID NO: 382, SEQ ID NO: 384, SEQ ID NO: 386, SEQ ID NO: 388, SEQ ID NO: 390, SEQ ID NO: 392, SEQ ID NO: 394, SEQ ID NO: 396, SEQ ID NO: 398, SEQ ID NO: 400, SEQ ID NO: 402, SEQ ID NO: 404, SEQ ID NO: 406, SEQ ID NO: 408, SEQ ID NO: 410, SEQ ID NO: 412, SEQ ID NO: 414, SEQ ID NO: 416, SEQ ID NO: 418, SEQ ID NO: 420, SEQ ID NO: 422, SEQ ID NO: 424, SEQ ID NO: 426, SEQ ID NO: 428, SEQ ID NO: 430, SEQ ID NO: 432, SEQ ID NO: 434 or SEQ ID NO: 440. In a further embodiment, the nucleic acid molecule of the present invention is at least 30% identical to the nucleic acid sequence depicted in SEQ ID NO: 1, SEQ ID NO: 3, SEQ ID NO: 5, SEQ ID NO: 7, SEQ ID NO: 9, SEQ ID NO: 11, SEQ ID NO: 13, SEQ ID NO: 15, SEQ ID NO: 19, SEQ ID NO: 21, SEQ ID NO: 23, SEQ ID NO: 25, SEQ ID NO: 27, SEQ ID NO: 29, SEQ ID NO: 31; SEQ ID NO: 64, SEQ ID NO: 66, SEQ ID NO: 68, SEQ ID NO: 70, SEQ ID NO: 72, SEQ ID NO: 74, SEQ ID NO: 76, SEQ ID NO: 78, SEQ ID NO: 80, SEQ ID NO: 82, SEQ ID NO: 84, SEQ ID NO: 86, SEQ ID NO: 88, SEQ ID NO: 90, SEQ ID NO: 92, SEQ ID NO: 94, SEQ ID NO: 96, SEQ ID NO: 98, SEQ ID NO: 100, SEQ ID NO: 102, SEQ ID NO: 104, SEQ ID NO: 106, SEQ ID NO: 108, SEQ ID NO: 110, SEQ ID NO: 112, SEQ ID NO: 114, SEQ ID NO: 116, SEQ ID NO: 118, SEQ ID NO: 120, SEQ ID NO: 122, SEQ ID NO: 124, SEQ ID NO: 126, SEQ ID NO: 128, SEQ ID NO: 130, SEQ ID NO: 132, SEQ ID NO: 134, SEQ ID NO: 136, SEQ ID NO: 138, SEQ ID NO: 140, SEQ ID NO: , SEQ ID NO: 142, SEQ ID NO: 151, SEQ ID NO: 153, SEQ ID NO: 155, SEQ ID NO: 157, SEQ ID NO: 159, SEQ ID NO: 161, SEQ ID NO: 163, SEQ ID NO: 165, SEQ ID NO: 167, SEQ ID NO: 169, SEQ ID NO: 171, SEQ ID NO: 173, SEQ ID NO: 175, SEQ ID NO: 177, SEQ ID NO: 179, SEQ ID NO: 181, SEQ ID NO: 183, SEQ ID NO: 185, SEQ ID NO: 187, SEQ ID NO: 189, SEQ ID NO: 191, SEQ ID NO: 193, SEQ ID NO: 195, SEQ ID NO: 197, SEQ ID NO: 199, SEQ ID NO: 201, SEQ ID NO: 203, SEQ ID NO: 205, SEQ ID NO: 207, SEQ ID NO: 209, SEQ ID NO: 211, SEQ ID NO: 213, SEQ ID NO: 215, SEQ ID NO: 217, SEQ ID NO: 219, SEQ ID NO: 228, SEQ ID NO: 230, SEQ ID NO: 232, SEQ ID NO: 234, SEQ ID NO: 236, SEQ ID NO: 238, SEQ ID NO: 240, SEQ ID NO: 242, SEQ ID NO: 249, SEQ ID NO: 251, SEQ ID NO: 253, SEQ ID NO: 255, SEQ ID NO: 257, SEQ ID NO: 259, SEQ ID NO: 261, SEQ ID NO: 263, SEQ ID NO: 265, SEQ ID NO: 267, SEQ ID NO: 269, SEQ ID NO: 271, SEQ ID NO: 282, SEQ ID NO: 284, SEQ ID NO: 286, SEQ ID NO: 288, SEQ ID NO: 290, SEQ ID NO: 292, SEQ ID NO: 294, SEQ ID NO: 296, SEQ ID NO: 298, SEQ ID NO: 300, SEQ ID NO: 302, SEQ ID NO: 304, SEQ ID NO: 306, SEQ ID NO: 308, SEQ ID NO: 310, SEQ ID NO: 312, SEQ ID NO: 314, SEQ ID NO: 316, SEQ ID NO: 318, SEQ ID NO: 320, SEQ ID NO: 322, SEQ ID NO: 324, SEQ ID NO: 326, SEQ ID NO: 328, SEQ ID NO: 330, SEQ ID NO: 332, SEQ ID NO: 334, SEQ ID NO: 336, SEQ ID NO: 338, SEQ ID NO: 340, SEQ ID NO: 342, SEQ ID NO: 344, SEQ ID NO: 346, SEQ ID NO: 348, SEQ ID NO: 350, SEQ ID NO: 352, SEQ ID NO: 354, SEQ ID NO: 356, SEQ ID NO: 358, SEQ ID NO: 360, SEQ ID NO: 362, SEQ ID NO: 364, SEQ ID NO: 366, SEQ ID NO: 368, SEQ ID NO: 370, SEQ ID NO: 372, SEQ ID NO: 374, SEQ ID NO: 376, SEQ ID NO: 378, SEQ ID NO: 380, SEQ ID NO: 382, SEQ ID NO: 384, SEQ ID NO: 386, SEQ ID NO: 388, SEQ ID NO: 390, SEQ ID NO: 392, SEQ ID NO: 394, SEQ ID NO: 396, SEQ ID NO: 398, SEQ ID NO: 400, SEQ ID NO: 402, SEQ ID NO: 404, SEQ ID NO: 406, SEQ ID NO: 408, SEQ ID NO: 410, SEQ ID NO: 412, SEQ ID NO: 414, SEQ ID NO: 416, SEQ ID NO: 418, SEQ ID NO: 420, SEQ ID NO: 422, SEQ ID NO: 424, SEQ ID NO: 426, SEQ ID NO: 428, SEQ ID NO: 430, SEQ ID NO: 432, SEQ ID NO: 434 or SEQ ID NO: 440 and less than 100%, preferably less than 99.999%, 99.99% or 99.9%, more preferably less than 99%, 985, 97%, 96% or 95% identical to the sequence shown in SEQ ID NO: 1, SEQ ID NO: 3, SEQ ID NO: 5, SEQ ID NO: 7, SEQ ID NO: 9, SEQ ID NO: 11, SEQ ID NO: 13, SEQ ID NO: 15, SEQ ID NO: 19, SEQ ID NO: 21, SEQ ID NO: 23, SEQ ID NO: 25, SEQ ID NO: 27, SEQ ID NO: 29, SEQ ID NO: 31; SEQ ID NO: 64, SEQ ID NO: 66, SEQ ID NO: 68, SEQ ID NO: 70, SEQ ID NO: 72, SEQ ID NO: 74, SEQ ID NO: 76, SEQ ID NO: 78, SEQ ID NO: 80, SEQ ID NO: 82, SEQ ID NO: 84, SEQ ID NO: 86, SEQ ID NO: 88, SEQ ID NO: 90, SEQ ID NO: 92, SEQ ID NO: 94, SEQ ID NO: 96, SEQ ID NO: 98, SEQ ID NO: 100, SEQ ID NO: 102, SEQ ID NO: 104, SEQ ID NO: 106, SEQ ID NO: 108, SEQ ID NO: 110, SEQ ID NO: 112, SEQ ID NO: 114, SEQ ID NO: 116, SEQ ID NO: 118, SEQ ID NO: 120, SEQ ID NO: 122, SEQ ID NO: 124, SEQ ID NO: 126, SEQ ID NO: 128, SEQ ID NO: 130, SEQ ID NO: 132, SEQ ID NO: 134, SEQ ID NO: 136, SEQ ID NO: 138, SEQ ID NO: 140, SEQ ID NO: , SEQ ID NO: 142, SEQ ID NO: 151, SEQ ID NO: 153, SEQ ID NO: 155, SEQ ID NO: 157, SEQ ID NO: 159, SEQ ID NO: 161, SEQ ID NO: 163, SEQ ID NO: 165, SEQ ID NO: 167, SEQ ID NO: 169, SEQ ID NO: 171, SEQ ID NO: 173, SEQ ID NO: 175, SEQ ID NO: 177, SEQ ID NO: 179, SEQ ID NO: 181, SEQ ID NO: 183, SEQ ID NO: 185, SEQ ID NO: 187, SEQ ID NO: 189, SEQ ID NO: 191, SEQ ID NO: 193, SEQ ID NO: 195, SEQ ID NO: 197, SEQ ID NO: 199, SEQ ID NO: 201, SEQ ID NO: 203, SEQ ID NO: 205, SEQ ID NO: 207, SEQ ID NO: 209, SEQ ID NO: 211, SEQ ID NO: 213, SEQ ID NO: 215, SEQ ID NO: 217, SEQ ID NO: 219, SEQ ID NO: 228, SEQ ID NO: 230, SEQ ID NO: 232, SEQ ID NO: 234, SEQ ID NO: 236, SEQ ID NO: 238, SEQ ID NO: 240, SEQ ID NO: 242, SEQ ID NO: 249, SEQ ID NO: 251, SEQ ID NO: 253, SEQ ID NO: 255, SEQ ID NO: 257, SEQ ID NO: 259, SEQ ID NO: 261, SEQ ID NO: 263, SEQ ID NO: 265, SEQ ID NO: 267, SEQ ID NO: 269, SEQ ID NO: 271, SEQ ID NO: 282, SEQ ID NO: 284, SEQ ID NO: 286, SEQ ID NO: 288, SEQ ID NO: 290, SEQ ID NO: 292, SEQ ID NO: 294, SEQ ID NO: 296, SEQ ID NO: 298, SEQ ID NO: 300, SEQ ID NO: 302, SEQ ID NO: 304, SEQ ID NO: 306, SEQ ID NO: 308, SEQ ID NO: 310, SEQ ID NO: 312, SEQ ID NO: 314, SEQ ID NO: 316, SEQ ID NO: 318, SEQ ID NO: 320, SEQ ID NO: 322, SEQ ID NO: 324, SEQ ID NO: 326, SEQ ID NO: 328, SEQ ID NO: 330, SEQ ID NO: 332, SEQ ID NO: 334, SEQ ID NO: 336, SEQ ID NO: 338, SEQ ID NO: 340, SEQ ID NO: 342, SEQ ID NO: 344, SEQ ID NO: 346, SEQ ID NO: 348, SEQ ID NO: 350, SEQ ID NO: 352, SEQ ID NO: 354, SEQ ID NO: 356, SEQ ID NO: 368, SEQ ID NO: 360, SEQ ID NO: 362, SEQ ID NO: 364, SEQ ID NO: 366, SEQ ID NO: 368, SEQ ID NO: 370, SEQ ID NO: 372, SEQ ID NO: 374, SEQ ID NO: 376, SEQ ID NO: 378, SEQ ID NO: 380, SEQ ID NO: 382, SEQ ID NO: 384, SEQ ID NO: 386, SEQ ID NO: 388, SEQ ID NO: 390, SEQ ID NO: 392, SEQ ID NO: 394, SEQ ID NO: 396, SEQ ID NO: 398, SEQ ID NO: 400, SEQ ID NO: 402, SEQ ID NO: 404, SEQ ID NO: 406, SEQ ID NO: 408, SEQ ID NO: 410, SEQ ID NO: 412, SEQ ID NO: 414, SEQ ID NO: 416, SEQ ID NO: 418, SEQ ID NO: 420, SEQ ID NO: 422, SEQ ID NO: 424, SEQ ID NO: 426, SEQ ID NO: 428, SEQ ID NO: 430, SEQ ID NO: 432, SEQ ID NO: 434 or SEQ ID NO: 440.

[0346] Preferably, the nucleic acid molecule a iso does not encode a polypeptide as shown in SEQ ID NO: 2, SEQ ID NO: 4, SEQ ID NO: 6, SEQ ID NO: 8, SEQ ID NO: 10, SEQ ID NO: 12, SEQ ID NO: 14, SEQ ID NO: 16, SEQ ID NO: 20, SEQ ID NO: 22, SEQ ID NO: 24, SEQ ID NO: 26, SEQ ID NO: 28, SEQ ID NO. 30, SEQ ID NO: 32; SEQ ID NO: 65, SEQ ID NO: 67, SEQ ID NO: 69, SEQ ID NO: 71, SEQ ID NO: 73, SEQ ID NO: 75, SEQ ID NO: 77, SEQ ID NO: 79, SEQ ID NO: 81, SEQ ID NO: 83, SEQ ID NO: 85, SEQ ID NO: 87, SEQ ID NO: 89, SEQ ID NO: 91, SEQ ID NO: 93, SEQ ID NO: 95, SEQ ID NO: 97, SEQ ID NO: 99, SEQ ID NO: 101, SEQ ID NO: 103, SEQ ID NO: 105, SEQ ID NO: 107, SEQ ID NO: 109, SEQ ID NO: 111, SEQ ID NO: 113, SEQ ID NO: 115, SEQ ID NO: 117, SEQ ID NO: 119, SEQ ID NO: 121, SEQ ID NO: 123, SEQ ID NO: 125, SEQ ID NO: 127, SEQ ID NO: 129, SEQ ID NO: 131, SEQ ID NO: 133, SEQ ID NO: 135, SEQ ID NO: 137, SEQ ID NO: 139, SEQ ID NO: 141, SEQ ID NO: 143, SEQ ID NO: 152, SEQ ID NO: 154, SEQ ID NO: 156, SEQ ID NO: 158, SEQ ID NO: 160, SEQ ID NO: 162, SEQ ID NO: 164, SEQ ID NO: 166, SEQ ID NO: 168, SEQ ID NO: 170, SEQ ID NO: 172, SEQ ID NO: 174, SEQ ID NO: 176, SEQ ID NO: 178, SEQ ID NO: 180, SEQ ID NO: 182, SEQ ID NO: 184, SEQ ID NO: 186, SEQ ID NO: 188, SEQ ID NO: 190, SEQ ID NO: 192, SEQ ID NO: 194, SEQ ID NO: 196, SEQ ID NO: 198, SEQ ID NO: 200, SEQ ID NO: 202, SEQ ID NO: 204, SEQ ID NO: 206, SEQ ID NO: 208, SEQ ID NO: 210, SEQ ID NO: 212, SEQ ID NO: 214, SEQ ID NO: 216, SEQ ID NO: 218, SEQ ID NO: 220, SEQ ID NO: 229, SEQ ID NO:231, SEQ ID NO:233, SEQ ID NO: 235, SEQ ID NO: 237, SEQ ID NO: 239, SEQ ID NO: 241, SEQ ID NO: 243, SEQ ID NO: 250, SEQ ID NO: 252, SEQ ID NO: 254, SEQ ID NO: 256, SEQ ID NO: 248, SEQ ID NO: 260, SEQ ID NO: 262, SEQ ID NO: 264, SEQ ID NO: 266, SEQ ID NO: 268, SEQ ID NO: 270, SEQ ID NO: 272, SEQ ID NO: 283, SEQ ID NO: 285, SEQ ID NO: 287, SEQ ID NO: 289, SEQ ID NO: 291, SEQ ID NO: 293, SEQ ID NO: 295, SEQ ID NO: 297, SEQ ID NO: 299, SEQ ID NO: 301, SEQ ID NO: 303, SEQ ID NO: 305, SEQ ID NO: 307, SEQ ID NO: 309, SEQ ID NO: 311, SEQ ID NO: 313, SEQ ID NO: 315, SEQ ID NO: 317, SEQ ID NO: 319, SEQ ID NO: 321, SEQ ID NO: 323, SEQ ID NO: 325, SEQ ID NO: 327, SEQ ID NO: 329, SEQ ID NO: 331, SEQ ID NO: 333, SEQ ID NO: 335, SEQ ID NO: 337, SEQ ID NO: 339, SEQ ID NO: 341, SEQ ID NO: 343, SEQ ID NO: 345, SEQ ID NO: 347, SEQ ID NO: 349, SEQ ID NO: 351, SEQ ID NO: 353, SEQ ID NO: 355, SEQ ID NO: 357, SEQ ID NO: 359, SEQ ID NO: 361, SEQ ID NO: 363, SEQ ID NO: 365, SEQ ID NO: 367, SEQ ID NO: 369, SEQ ID NO: 371, SEQ ID NO: 373, SEQ ID NO: 375, SEQ ID NO: 377, SEQ ID NO: 379, SEQ ID NO: 381, SEQ ID NO: 383, SEQ ID NO: 385, SEQ ID NO: 387, SEQ ID NO: 389, SEQ ID NO: 391, SEQ ID NO: 393, SEQ ID NO: 395, SEQ ID NO: 397, SEQ ID NO: 399, SEQ ID NO: 401, SEQ ID NO: 403, SEQ ID NO: 405, SEQ ID NO: 407, SEQ ID NO: 409, SEQ ID NO: 411, SEQ ID NO: 413, SEQ ID NO: 415, SEQ ID NO: 417, SEQ ID NO: 419, SEQ ID NO: 421, SEQ ID NO: 423, SEQ ID NO: 425, SEQ ID NO: 427, SEQ ID NO: 429, SEQ ID NO: 431, SEQ ID NO: 433, SEQ ID NO: 435 or SEQ ID NO: 441. In another embodiment, the nucleic acid molecule depicted in SEQ ID NO: 1, SEQ ID NO: 3, SEQ ID NO: 5, SEQ ID NO: 7, SEQ ID NO: 9, SEQ ID NO: 11, SEQ ID NO: 13, SEQ ID NO: 15, SEQ ID NO: 19, SEQ ID NO: 21, SEQ ID NO: 23, SEQ ID NO: 25, SEQ ID NO: 27, SEQ ID NO: 29, SEQ ID NO: 31; SEQ ID NO: 64, SEQ ID NO: 66, SEQ ID NO: 68, SEQ ID NO: 70, SEQ ID NO: 72, SEQ ID NO: 74, SEQ ID NO: 76, SEQ ID NO: 78, SEQ ID NO: 80, SEQ ID NO: 82, SEQ ID NO: 84, SEQ ID NO: 86, SEQ ID NO: 88, SEQ ID NO: 90, SEQ ID NO: 92, SEQ ID NO: 94, SEQ ID NO: 96, SEQ ID NO: 98, SEQ ID NO: 100, SEQ ID NO: 102, SEQ ID NO: 104, SEQ ID NO: 106, SEQ ID NO: 108, SEQ ID NO: 110, SEQ ID NO: 112, SEQ ID NO: 114, SEQ ID NO: 116, SEQ ID NO: 118, SEQ ID NO: 120, SEQ ID NO: 122, SEQ ID NO: 124, SEQ ID NO: 126, SEQ ID NO: 128, SEQ ID NO: 130, SEQ ID NO: 132, SEQ ID NO: 134, SEQ ID NO: 136, SEQ ID NO: 138, SEQ ID NO: 140, SEQ ID NO: , SEQ ID NO: 142, SEQ ID NO: 151, SEQ ID NO: 153, SEQ ID NO: 155, SEQ ID NO: 157, SEQ ID NO: 159, SEQ ID NO: 161, SEQ ID NO: 163, SEQ ID NO: 165, SEQ ID NO: 167, SEQ ID NO: 169, SEQ ID NO: 171, SEQ ID NO: 173, SEQ ID NO: 175, SEQ ID NO: 177, SEQ ID NO: 179, SEQ ID NO: 181, SEQ ID NO: 183, SEQ ID NO: 185, SEQ ID NO: 187, SEQ ID NO: 189, SEQ ID NO: 191, SEQ ID NO: 193, SEQ ID NO: 195, SEQ ID NO: 197, SEQ ID NO: 199, SEQ ID NO: 201, SEQ ID NO: 203, SEQ ID NO: 205, SEQ ID NO: 207, SEQ ID NO: 209, SEQ ID NO: 211, SEQ ID NO: 213, SEQ ID NO: 215, SEQ ID NO: 217, SEQ ID NO: 219, SEQ ID NO: 228, SEQ ID NO: 230, SEQ ID NO: 232, SEQ ID NO: 234, SEQ ID NO: 236, SEQ ID NO: 238, SEQ ID NO: 240, SEQ ID NO: 242, SEQ ID NO: 249, SEQ ID NO: 251, SEQ ID NO: 253, SEQ ID NO: 255, SEQ ID NO: 257, SEQ ID NO: 259, SEQ ID NO: 261, SEQ ID NO: 263, SEQ ID NO: 265, SEQ ID NO: 267, SEQ ID NO: 269, SEQ ID NO: 271, SEQ ID NO: 282, SEQ ID NO: 284, SEQ ID NO: 286, SEQ ID NO: 288, SEQ ID NO: 290, SEQ ID NO: 292, SEQ ID NO: 294, SEQ ID NO: 296, SEQ ID NO: 298, SEQ ID NO: 300, SEQ ID NO: 302, SEQ ID NO: 304, SEQ ID NO: 306, SEQ ID NO: 308, SEQ ID NO: 310, SEQ ID NO: 312, SEQ ID NO: 314, SEQ ID NO: 316, SEQ ID NO: 318, SEQ ID NO: 320, SEQ ID NO: 322, SEQ ID NO: 324, SEQ ID NO: 326, SEQ ID NO: 328, SEQ ID NO: 330, SEQ ID NO: 332, SEQ ID NO: 334, SEQ ID NO: 336, SEQ ID NO: 338, SEQ ID NO: 340, SEQ ID NO: 342, SEQ ID NO: 344, SEQ ID NO: 346, SEQ ID NO: 348, SEQ ID NO: 350, SEQ ID NO: 352, SEQ ID NO: 354, SEQ ID NO: 356, SEQ ID NO: 358, SEQ ID NO: 360, SEQ ID NO: 362, SEQ ID NO: 364, SEQ ID NO: 366, SEQ ID NO: 368, SEQ ID NO: 370, SEQ ID NO: 372, SEQ ID NO: 374, SEQ ID NO: 376, SEQ ID NO: 378, SEQ ID NO: 380, SEQ ID NO: 382, SEQ ID NO: 384, SEQ ID NO: 386, SEQ ID NO: 388, SEQ ID NO: 390, SEQ ID NO: 392, SEQ ID NO: 394, SEQ ID NO: 396, SEQ ID NO: 398, SEQ ID NO: 400, SEQ ID NO: 402, SEQ ID NO: 404, SEQ ID NO: 406, SEQ ID NO: 408, SEQ ID NO: 410, SEQ ID NO: 412, SEQ ID NO: 414, SEQ ID NO: 416, SEQ ID NO: 418, SEQ ID NO: 420, SEQ ID NO: 422, SEQ ID NO: 424, SEQ ID NO: 426, SEQ ID NO: 428, SEQ ID NO: 430, SEQ ID NO: 432, SEQ ID NO: 434 or SEQ ID NO: 440 does not encode a protein of the sequence shown in SEQ ID NO: 2, SEQ ID NO: 4, SEQ ID NO: 6, SEQ ID NO: 8, SEQ ID NO: 10, SEQ ID NO: 12, SEQ ID NO: 14, SEQ ID NO: 16, SEQ ID NO: 20, SEQ ID NO: 22, SEQ ID NO: 24, SEQ ID NO: 26, SEQ ID NO: 28, SEQ ID NO. 30, SEQ ID NO: 32; SEQ ID NO: 65, SEQ ID NO: 67, SEQ ID NO: 69, SEQ ID NO: 71, SEQ ID NO: 73, SEQ ID NO: 75, SEQ ID NO: 77, SEQ ID NO: 79, SEQ ID NO: 81, SEQ ID NO: 83, SEQ ID NO: 85, SEQ ID NO: 87, SEQ ID NO: 89, SEQ ID NO: 91, SEQ ID NO: 93, SEQ ID NO: 95, SEQ ID NO: 97, SEQ ID NO: 99, SEQ ID NO: 101, SEQ ID NO: 103, SEQ ID NO: 105, SEQ ID NO: 107, SEQ ID NO: 109, SEQ ID NO: 111, SEQ ID NO: 113, SEQ ID NO: 115, SEQ ID NO: 117, SEQ ID NO: 119, SEQ ID NO: 121, SEQ ID NO: 123, SEQ ID NO: 125, SEQ ID NO: 127, SEQ ID NO: 129, SEQ ID NO: 131, SEQ ID NO: 133, SEQ ID NO: 135, SEQ ID NO: 137, SEQ ID NO: 139, SEQ ID NO: 141, SEQ ID NO: 143, SEQ ID NO: 152, SEQ ID NO: 154, SEQ ID NO: 156, SEQ ID NO: 158, SEQ ID NO: 160, SEQ ID NO: 162, SEQ ID NO: 164, SEQ ID NO: 166, SEQ ID NO: 168, SEQ ID NO: 170, SEQ ID NO: 172, SEQ ID NO: 174, SEQ ID NO: 176, SEQ ID NO: 178, SEQ ID NO: 180, SEQ ID NO: 182, SEQ ID NO: 184, SEQ ID NO: 186, SEQ ID NO: 188, SEQ ID NO: 190, SEQ ID NO: 192, SEQ ID NO: 194, SEQ ID NO: 196, SEQ ID NO: 198, SEQ ID NO: 200, SEQ ID NO: 202, SEQ ID NO: 204, SEQ ID NO: 206, SEQ ID NO: 208, SEQ ID NO: 210, SEQ ID NO: 212, SEQ ID NO: 214, SEQ ID NO: 216, SEQ ID NO: 218, SEQ ID NO: 220, SEQ ID NO: 229, SEQ ID NO:231, SEQ ID NO:233, SEQ ID NO: 235, SEQ ID NO: 237, SEQ ID NO: 239, SEQ ID NO: 241, SEQ ID NO: 243, SEQ ID NO: 250, SEQ ID NO: 252, SEQ ID NO: 254, SEQ ID NO: 256, SEQ ID NO: 258, SEQ ID NO: 260, SEQ ID NO: 262, SEQ ID NO: 264, SEQ ID NO: 266, SEQ ID NO: 268, SEQ ID NO: 270, SEQ ID NO: 272, SEQ ID NO: 283, SEQ ID NO: 285, SEQ ID NO: 287, SEQ ID NO: 289, SEQ ID NO: 291, SEQ ID NO: 293, SEQ ID NO: 295, SEQ ID NO: 297, SEQ ID NO: 299, SEQ ID NO: 301, SEQ ID NO: 303, SEQ ID NO: 305, SEQ ID NO: 307, SEQ ID NO: 309, SEQ ID NO: 311, SEQ ID NO: 313, SEQ ID NO: 315, SEQ ID NO: 317, SEQ ID NO: 319, SEQ ID NO: 321, SEQ ID NO: 323, SEQ ID NO: 325, SEQ ID NO: 327, SEQ ID NO: 329, SEQ ID NO: 331, SEQ ID NO: 333, SEQ ID NO: 335, SEQ ID NO: 337, SEQ ID NO: 339, SEQ ID NO: 341, SEQ ID NO: 343, SEQ ID NO: 345, SEQ ID NO: 347, SEQ ID NO: 349, SEQ ID NO: 351, SEQ ID NO: 353, SEQ ID NO: 355, SEQ ID NO: 357, SEQ ID NO: 359, SEQ ID NO: 361, SEQ ID NO: 363, SEQ ID NO: 365, SEQ ID NO: 367, SEQ ID NO: 369, SEQ ID NO: 371, SEQ ID NO: 373, SEQ ID NO: 375, SEQ ID NO: 377, SEQ ID NO: 379, SEQ ID NO: 381, SEQ ID NO: 383, SEQ ID NO: 385, SEQ ID NO: 387, SEQ ID NO: 389, SEQ ID NO: 391, SEQ ID NO: 393, SEQ ID NO: 395, SEQ ID NO: 397, SEQ ID NO: 399, SEQ ID NO: 401, SEQ ID NO: 403, SEQ ID NO: 405, SEQ ID NO: 407, SEQ ID NO: 409, SEQ ID NO: 411, SEQ ID NO: 413, SEQ ID NO: 415, SEQ ID NO: 417, SEQ ID NO: 419, SEQ ID NO: 421, SEQ ID NO: 423, SEQ ID NO: 425, SEQ ID NO: 427, SEQ ID NO: 429, SEQ ID NO: 431, SEQ ID NO: 433, SEQ ID NO: 435 or SEQ ID NO: 441. That means the protein sequences depicted in SEQ ID NO: 2, SEQ ID NO: 4, SEQ ID NO: 6, SEQ ID NO: 8, SEQ ID NO: 10, SEQ ID NO: 12, SEQ ID NO: 14, SEQ ID NO: 16, SEQ ID NO: 20, SEQ ID NO: 22, SEQ ID NO: 24, SEQ ID NO: 26, SEQ ID NO: 28, SEQ ID NO. 30, SEQ ID NO: 32; SEQ ID NO: 65, SEQ ID NO: 67, SEQ ID NO: 69, SEQ ID NO: 71, SEQ ID NO: 73, SEQ ID NO: 75, SEQ ID NO: 77, SEQ ID NO: 79, SEQ ID NO: 81, SEQ ID NO: 83, SEQ ID NO: 85, SEQ ID NO: 87, SEQ ID NO: 89, SEQ ID NO: 91, SEQ ID NO: 93, SEQ ID NO: 95, SEQ ID NO: 97, SEQ ID NO: 99, SEQ ID NO: 101, SEQ ID NO: 103, SEQ ID NO: 105, SEQ ID NO: 107, SEQ ID NO: 109, SEQ ID NO: 111, SEQ ID NO: 113, SEQ ID NO: 115, SEQ ID NO: 117, SEQ ID NO: 119, SEQ ID NO: 121, SEQ ID NO: 123, SEQ ID NO: 125, SEQ ID NO: 127, SEQ ID NO: 129, SEQ ID NO: 131, SEQ ID NO: 133, SEQ ID NO: 135, SEQ ID NO: 137, SEQ ID NO: 139, SEQ ID NO: 141, SEQ ID NO: 143, SEQ ID NO: 152, SEQ ID NO: 154, SEQ ID NO: 156, SEQ ID NO: 158, SEQ ID NO: 160, SEQ ID NO: 162, SEQ ID NO: 164, SEQ ID NO: 166, SEQ ID NO: 168, SEQ ID NO: 170, SEQ ID NO: 172, SEQ ID NO: 174, SEQ ID NO: 176, SEQ ID NO: 178, SEQ ID NO: 180, SEQ ID NO: 182, SEQ ID NO: 184, SEQ ID NO: 186, SEQ ID NO: 188, SEQ ID NO: 190, SEQ ID NO: 192, SEQ ID NO: 194, SEQ ID NO: 196, SEQ ID NO: 198, SEQ ID NO: 200, SEQ ID NO: 202, SEQ ID NO: 204, SEQ ID NO: 206, SEQ ID NO: 208, SEQ ID NO: 210, SEQ ID NO: 212, SEQ ID NO: 214, SEQ ID NO: 216, SEQ ID NO: 218, SEQ ID NO: 220, SEQ ID NO: 229, SEQ ID NO:231, SEQ ID NO:233, SEQ ID NO: 235, SEQ ID NO: 237, SEQ ID NO: 239, SEQ ID NO: 241, SEQ ID NO: 243, SEQ ID NO: 250, SEQ ID NO: 252, SEQ ID NO: 254, SEQ ID NO: 256, SEQ ID NO: 258, SEQ ID NO: 260, SEQ ID NO: 262, SEQ ID NO: 264, SEQ ID NO: 266, SEQ ID NO: 268, SEQ ID NO: 270, SEQ ID NO: 272, SEQ ID NO: 283, SEQ ID NO: 285, SEQ ID NO: 287, SEQ ID NO: 289, SEQ ID NO: 291, SEQ ID NO: 293, SEQ ID NO: 295, SEQ ID NO: 297, SEQ ID NO: 299, SEQ ID NO: 301, SEQ ID NO: 303, SEQ ID NO: 305, SEQ ID NO: 307, SEQ ID NO: 309, SEQ ID NO: 311, SEQ ID NO: 313, SEQ ID NO: 315, SEQ ID NO: 317, SEQ ID NO: 319, SEQ ID NO: 321, SEQ ID NO: 323, SEQ ID NO: 325, SEQ ID NO: 327, SEQ ID NO: 329, SEQ ID NO: 331, SEQ ID NO: 333, SEQ ID NO: 335, SEQ ID NO: 337, SEQ ID NO: 339, SEQ ID NO: 341, SEQ ID NO: 343, SEQ ID NO: 345, SEQ ID NO: 347, SEQ ID NO: 349, SEQ ID NO: 351, SEQ ID NO: 353, SEQ ID NO: 355, SEQ ID NO: 357, SEQ ID NO: 359, SEQ ID NO: 361, SEQ ID NO: 363, SEQ ID NO: 365, SEQ ID NO: 367, SEQ ID NO: 369, SEQ ID NO: 371, SEQ ID NO: 373, SEQ ID NO: 375, SEQ ID NO: 377, SEQ ID NO: 379, SEQ ID NO: 381, SEQ ID NO: 383, SEQ ID NO: 385, SEQ ID NO: 387, SEQ ID NO: 389, SEQ ID NO: 391, SEQ ID NO: 393, SEQ ID NO: 395, SEQ ID NO: 397, SEQ ID NO: 399, SEQ ID NO: 401, SEQ ID NO: 403, SEQ ID NO: 405, SEQ ID NO: 407, SEQ ID NO: 409, SEQ ID NO: 411, SEQ ID NO: 413, SEQ ID NO: 415, SEQ ID NO: 417, SEQ ID NO: 419, SEQ ID NO: 421, SEQ ID NO: 423, SEQ ID NO: 425, SEQ ID NO: 427, SEQ ID NO: 429, SEQ ID NO: 431, SEQ ID NO: 433, SEQ ID NO: 435 or SEQ ID NO: 441 does not consist of the sequence shown in SEQ ID NO: 2, SEQ ID NO: 4, SEQ ID NO: 6, SEQ ID NO: 8, SEQ ID NO: 10, SEQ ID NO: 12, SEQ ID NO: 14, SEQ ID NO: 16, SEQ ID NO: 20, SEQ ID NO: 22, SEQ ID NO: 24, SEQ ID NO: 26, SEQ ID NO: 28, SEQ ID NO. 30, SEQ ID NO: 32; SEQ ID NO: 65, SEQ ID NO: 67, SEQ ID NO: 69, SEQ ID NO: 71, SEQ ID NO: 73, SEQ ID NO: 75, SEQ ID NO: 77, SEQ ID NO: 79, SEQ ID NO: 81, SEQ ID NO: 83, SEQ ID NO: 85, SEQ ID NO: 87, SEQ ID NO: 89, SEQ ID NO: 91, SEQ ID NO: 93, SEQ ID NO: 95, SEQ ID NO: 97, SEQ ID NO: 99, SEQ ID NO: 101, SEQ ID NO: 103, SEQ ID NO: 105, SEQ ID NO: 107, SEQ ID NO: 109, SEQ ID NO: 111, SEQ ID NO: 113, SEQ ID NO: 115, SEQ ID NO: 117, SEQ ID NO: 119, SEQ ID NO: 121, SEQ ID NO: 123, SEQ ID NO: 125, SEQ ID NO: 127, SEQ ID NO: 129, SEQ ID NO: 131, SEQ ID NO: 133, SEQ ID NO: 135, SEQ ID NO: 137, SEQ ID NO: 139, SEQ ID NO: 141, SEQ ID NO: 143, SEQ ID NO: 152, SEQ ID NO: 154, SEQ ID NO: 156, SEQ ID NO: 158, SEQ ID NO: 160, SEQ ID NO: 162, SEQ ID NO: 164, SEQ ID NO: 166, SEQ ID NO: 168, SEQ ID NO: 170, SEQ ID NO: 172, SEQ ID NO: 174, SEQ ID NO: 176, SEQ ID NO: 178, SEQ ID NO: 180, SEQ ID NO: 182, SEQ ID NO: 184, SEQ ID NO: 186, SEQ ID NO: 188, SEQ ID NO: 190, SEQ ID NO: 192, SEQ ID NO: 194, SEQ ID NO: 196, SEQ ID NO: 198, SEQ ID NO: 200, SEQ ID NO: 202, SEQ ID NO: 204, SEQ ID NO: 206, SEQ ID NO: 208, SEQ ID NO: 210, SEQ ID NO: 212, SEQ ID NO: 214, SEQ ID NO: 216, SEQ ID NO: 218, SEQ ID NO: 220, SEQ ID NO: 229, SEQ ID NO:231, SEQ ID NO:233, SEQ ID NO: 235, SEQ ID NO: 237, SEQ ID NO: 239, SEQ ID NO: 241, SEQ ID NO: 243, SEQ ID NO: 250, SEQ ID NO: 252, SEQ ID NO: 254, SEQ ID NO: 256, SEQ ID NO: 258, SEQ ID NO: 260, SEQ ID NO: 262, SEQ ID NO: 264, SEQ ID NO: 266, SEQ ID NO: 268, SEQ ID NO: 270, SEQ ID NO: 272, SEQ ID NO: 283, SEQ ID NO: 285, SEQ ID NO: 287, SEQ ID NO: 289, SEQ ID NO: 291, SEQ ID NO: 293, SEQ ID NO: 295, SEQ ID NO: 297, SEQ ID NO: 299, SEQ ID NO: 301, SEQ ID NO: 303, SEQ ID NO: 305, SEQ ID NO: 307, SEQ ID NO: 309, SEQ ID NO: 311, SEQ ID NO: 313, SEQ ID NO: 315, SEQ ID NO: 317, SEQ ID NO: 319, SEQ ID NO: 321, SEQ ID NO: 323, SEQ ID NO: 325, SEQ ID NO: 327, SEQ ID NO: 329, SEQ ID NO: 331, SEQ ID NO: 333, SEQ ID NO: 335, SEQ ID NO: 337, SEQ ID NO: 339, SEQ ID NO: 341, SEQ ID NO: 343, SEQ ID NO: 345, SEQ ID NO: 347, SEQ ID NO: 349, SEQ ID NO: 351, SEQ ID NO: 353, SEQ ID NO: 355, SEQ ID NO: 357, SEQ ID NO: 359, SEQ ID NO: 361, SEQ ID NO: 363, SEQ ID NO: 365, SEQ ID NO: 367, SEQ ID NO: 369, SEQ ID NO: 371, SEQ ID NO: 373, SEQ ID NO: 375, SEQ ID NO: 377, SEQ ID NO: 379, SEQ ID NO: 381, SEQ ID NO: 383, SEQ ID NO: 385, SEQ ID NO: 387, SEQ ID NO: 389, SEQ ID NO: 391, SEQ ID NO: 393, SEQ ID NO: 395, SEQ ID NO: 397, SEQ ID NO: 399, SEQ ID NO: 401, SEQ ID NO: 403, SEQ ID NO: 405, SEQ ID NO: 407, SEQ ID NO: 409, SEQ ID NO: 411, SEQ ID NO: 413, SEQ ID NO: 415, SEQ ID NO: 417, SEQ ID NO: 419, SEQ ID NO: 421, SEQ ID NO: 423, SEQ ID NO: 425, SEQ ID NO: 427, SEQ ID NO: 429, SEQ ID NO: 431, SEQ ID NO: 433, SEQ ID NO: 435 or SEQ ID NO: 441. In a further embodiment, the protein of the present invention is at least 30% identical to protein sequence depicted in SEQ ID NO: 2, SEQ ID NO: 4, SEQ ID NO: 6, SEQ ID NO: 8, SEQ ID NO: 10, SEQ ID NO: 12, SEQ ID NO: 14, SEQ ID NO: 16, SEQ ID NO: 20, SEQ ID NO: 22, SEQ ID NO: 24, SEQ ID NO: 26, SEQ ID NO: 28, SEQ ID NO. 30, SEQ ID NO: 32; SEQ ID NO: 65, SEQ ID NO: 67, SEQ ID NO: 69, SEQ ID NO: 71, SEQ ID NO: 73, SEQ ID NO: 75, SEQ ID NO: 77, SEQ ID NO: 79, SEQ ID NO: 81, SEQ ID NO: 83, SEQ ID NO: 85, SEQ ID NO: 87, SEQ ID NO: 89, SEQ ID NO: 91, SEQ ID NO: 93, SEQ ID NO: 95, SEQ ID NO: 97, SEQ ID NO: 99, SEQ ID NO: 101, SEQ ID NO: 103, SEQ ID NO: 105, SEQ ID NO: 107, SEQ ID NO: 109, SEQ ID NO: 111, SEQ ID NO: 113, SEQ ID NO: 115, SEQ ID NO: 117, SEQ ID NO: 119, SEQ ID NO: 121, SEQ ID NO: 123, SEQ ID NO: 125, SEQ ID NO: 127, SEQ ID NO: 129, SEQ ID NO: 131, SEQ ID NO: 133, SEQ ID NO: 135, SEQ ID NO: 137, SEQ ID NO: 139, SEQ ID NO: 141, SEQ ID NO: 143, SEQ ID NO: 152, SEQ ID NO: 154, SEQ ID NO: 156, SEQ ID NO: 158, SEQ ID NO: 160, SEQ ID NO: 162, SEQ ID NO: 164, SEQ ID NO: 166, SEQ ID NO: 168, SEQ ID NO: 170, SEQ ID NO: 172, SEQ ID NO: 174, SEQ ID NO: 176, SEQ ID NO: 178, SEQ ID NO: 180, SEQ ID NO: 182, SEQ ID NO: 184, SEQ ID NO: 186, SEQ ID NO: 188, SEQ ID NO: 190, SEQ ID NO: 192, SEQ ID NO: 194, SEQ ID NO: 196, SEQ ID NO: 198, SEQ ID NO: 200, SEQ ID NO: 202, SEQ ID NO: 204, SEQ ID NO: 206, SEQ ID NO: 208, SEQ ID NO: 210, SEQ ID NO: 212, SEQ ID NO: 214, SEQ ID NO: 216, SEQ ID NO: 218, SEQ ID NO: 220, SEQ ID NO: 229, SEQ ID NO:231, SEQ ID NO:233, SEQ ID NO: 235, SEQ ID NO: 237, SEQ ID NO: 239, SEQ ID NO: 241, SEQ ID NO: 243, SEQ ID NO: 250, SEQ ID NO: 252, SEQ ID NO: 254, SEQ ID NO: 256, SEQ ID NO: 258, SEQ ID NO: 260, SEQ ID NO: 262, SEQ ID NO: 264, SEQ ID NO: 266, SEQ ID NO: 268, SEQ ID NO: 270, SEQ ID NO: 272, SEQ ID NO: 283, SEQ ID NO: 285, SEQ ID NO: 287, SEQ ID NO: 289, SEQ ID NO: 291, SEQ ID NO: 293, SEQ ID NO: 295, SEQ ID NO: 297, SEQ ID NO: 299, SEQ ID NO: 301, SEQ ID NO: 303, SEQ ID NO: 305, SEQ ID NO: 307, SEQ ID NO: 309, SEQ ID NO: 311, SEQ ID NO: 313, SEQ ID NO: 315, SEQ ID NO: 317, SEQ ID NO: 319, SEQ ID NO: 321, SEQ ID NO: 323, SEQ ID NO: 325, SEQ ID NO: 327, SEQ ID NO: 329, SEQ ID NO: 331, SEQ ID NO: 333, SEQ ID NO: 335, SEQ ID NO: 337, SEQ ID NO: 339, SEQ ID NO: 341, SEQ ID NO: 343, SEQ ID NO: 345, SEQ ID NO: 347, SEQ ID NO: 349, SEQ ID NO: 351, SEQ ID NO: 353, SEQ ID NO: 355, SEQ ID NO: 357, SEQ ID NO: 359, SEQ ID NO: 361, SEQ ID NO: 363, SEQ ID NO: 365, SEQ ID NO: 367, SEQ ID NO: 369, SEQ ID NO: 371, SEQ ID NO: 373, SEQ ID NO: 375, SEQ ID NO: 377, SEQ ID NO: 379, SEQ ID NO: 381, SEQ ID NO: 383, SEQ ID NO: 385, SEQ ID NO: 387, SEQ ID NO: 389, SEQ ID NO: 391, SEQ ID NO: 393, SEQ ID NO: 395, SEQ ID NO: 397, SEQ ID NO: 399, SEQ ID NO: 401, SEQ ID NO: 403, SEQ ID NO: 405, SEQ ID NO: 407, SEQ ID NO: 409, SEQ ID NO: 411, SEQ ID NO: 413, SEQ ID NO: 415, SEQ ID NO: 417, SEQ ID NO: 419, SEQ ID NO: 421, SEQ ID NO: 423, SEQ ID NO: 425, SEQ ID NO: 427, SEQ ID NO: 429, SEQ ID NO: 431, SEQ ID NO: 433, SEQ ID NO: 435 or SEQ ID NO: 441 and less than 100%, preferably less than 99.999%, 99.99% or 99.9%, more preferably less than 99%, 985, 97%, 96% or 95% identical to the sequence shown in SEQ ID NO: 2, SEQ ID NO: 4, SEQ ID NO: 6, SEQ ID NO: 8, SEQ ID NO: 10, SEQ ID NO: 12, SEQ ID NO: 14, SEQ ID NO: 16, SEQ ID NO: 20, SEQ ID NO: 22, SEQ ID NO: 24, SEQ ID NO: 26, SEQ ID NO: 28, SEQ ID NO. 30, SEQ ID NO: 32; SEQ ID NO: 65, SEQ ID NO: 67, SEQ ID NO: 69, SEQ ID NO: 71, SEQ ID NO: 73, SEQ ID NO: 75, SEQ ID NO: 77, SEQ ID NO: 79, SEQ ID NO: 81, SEQ ID NO: 83, SEQ ID NO: 85, SEQ ID NO: 87, SEQ ID NO: 89, SEQ ID NO: 91, SEQ ID NO: 93, SEQ ID NO: 95, SEQ ID NO: 97, SEQ ID NO: 99, SEQ ID NO: 101, SEQ ID NO: 103, SEQ ID NO: 105, SEQ ID NO: 107, SEQ ID NO: 109, SEQ ID NO: 111, SEQ ID NO: 113, SEQ ID NO: 115, SEQ ID NO: 117, SEQ ID NO: 119, SEQ ID NO: 121, SEQ ID NO: 123, SEQ ID NO: 125, SEQ ID NO: 127, SEQ ID NO: 129, SEQ ID NO: 131, SEQ ID NO: 133, SEQ ID NO: 135, SEQ ID NO: 137, SEQ ID NO: 139, SEQ ID NO: 141, SEQ ID NO: 143, SEQ ID NO: 152, SEQ ID NO: 154, SEQ ID NO: 156, SEQ ID NO: 158, SEQ ID NO: 160, SEQ ID NO: 162, SEQ ID NO: 164, SEQ ID NO: 166, SEQ ID NO: 168, SEQ ID NO: 170, SEQ ID NO: 172, SEQ ID NO: 174, SEQ ID NO: 176, SEQ ID NO: 178, SEQ ID NO: 180, SEQ ID NO: 182, SEQ ID NO: 184, SEQ ID NO: 186, SEQ ID NO: 188, SEQ ID NO: 190, SEQ ID NO: 192, SEQ ID NO: 194, SEQ ID NO: 196, SEQ ID NO: 198, SEQ ID NO: 200, SEQ ID NO: 202, SEQ ID NO: 204, SEQ ID NO: 206, SEQ ID NO: 208, SEQ ID NO: 210, SEQ ID NO: 212, SEQ ID NO: 214, SEQ ID NO: 216, SEQ ID NO: 218, SEQ ID NO: 220, SEQ ID NO: 229, SEQ ID NO:231, SEQ ID NO:233, SEQ ID NO: 235, SEQ ID NO: 237, SEQ ID NO: 239, SEQ ID NO: 241, SEQ ID NO: 243, SEQ ID NO: 250, SEQ ID NO: 252, SEQ ID NO: 254, SEQ ID NO: 256, SEQ ID NO: 258, SEQ ID NO: 260, SEQ ID NO: 262, SEQ ID NO: 264, SEQ ID NO: 266, SEQ ID NO: 268, SEQ ID NO: 270, SEQ ID NO: 272, SEQ ID NO: 283, SEQ ID NO: 285, SEQ ID NO: 287, SEQ ID NO: 289, SEQ ID NO: 291, SEQ ID NO: 293, SEQ ID NO: 295, SEQ ID NO: 297, SEQ ID NO: 299, SEQ ID NO: 301, SEQ ID NO: 303, SEQ ID NO: 305, SEQ ID NO: 307, SEQ ID NO: 309, SEQ ID NO: 311, SEQ ID NO: 313, SEQ ID NO: 315, SEQ ID NO: 317, SEQ ID NO: 319, SEQ ID NO: 321, SEQ ID NO: 323, SEQ ID NO: 325, SEQ ID NO: 327, SEQ ID NO: 329, SEQ ID NO: 331, SEQ ID NO: 333, SEQ ID NO: 335, SEQ ID NO: 337, SEQ ID NO: 339, SEQ ID NO: 341, SEQ ID NO: 343, SEQ ID NO: 345, SEQ ID NO: 347, SEQ ID NO: 349, SEQ ID NO: 351, SEQ ID NO: 353, SEQ ID NO: 355, SEQ ID NO: 357, SEQ ID NO: 359, SEQ ID NO: 361, SEQ ID NO: 363, SEQ ID NO: 365, SEQ ID NO: 367, SEQ ID NO: 369, SEQ ID NO: 371, SEQ ID NO: 373, SEQ ID NO: 375, SEQ ID NO: 377, SEQ ID NO: 379, SEQ ID NO: 381, SEQ ID NO: 383, SEQ ID NO: 385, SEQ ID NO: 387, SEQ ID NO: 389, SEQ ID NO: 391, SEQ ID NO: 393, SEQ ID NO: 395, SEQ ID NO: 397, SEQ ID NO: 399, SEQ ID NO: 401, SEQ ID NO: 403, SEQ ID NO: 405, SEQ ID NO: 407, SEQ ID NO: 409, SEQ ID NO: 411, SEQ ID NO: 413, SEQ ID NO: 415, SEQ ID NO: 417, SEQ ID NO: 419, SEQ ID NO: 421, SEQ ID NO: 423, SEQ ID NO: 425, SEQ ID NO: 427, SEQ ID NO: 429, SEQ ID NO: 431, SEQ ID NO: 433, SEQ ID NO: 435 or SEQ ID NO: 441.

[0347] The nucleic acid sequences used in the process are advantageously introduced in a nucleic acid construct, preferably an expression cassette, which allows the reduction, depression etc. of the nucleic acid molecules in an organism, advantageously a plant or a microorganism.

[0348] Accordingly, the invention also relates to a nucleic acid construct, preferably to an expression construct, comprising the nucleic acid molecule of the present invention or a fragment thereof functionally linked to one or more regulatory elements or signals.

[0349] As described herein, the nucleic acid construct can also comprise further genes, which are to be introduced into the organisms or cells. It is possible and advantageous to introduce into, and express in, the host organisms regulatory genes such as genes for inductors, repressors or enzymes, which, owing to their enzymatic activity, engage in the regulation of one or more genes of a biosynthetic pathway. These genes can be of heterologous or homologous origin. Moreover, further biosynthesis genes may advantageously be present, or else these genes may be located on one or more further nucleic acid constructs. Genes, which are advantageously employed as biosynthesis genes are genes of the amino acid metabolism, of glycolysis, of the tricarboxylic acid metabolism or their combinations.

[0350] As described herein, regulator sequences or factors can have a positive effect on preferably the gene expression of the genes introduced, thus increasing it. Thus, an enhancement of the regulator elements may advantageously take place at the transcriptional level by using strong transcription signals such as promoters and/or enhancers. In addition, however, an enhancement of translation is also possible, for example by increasing RNA stability. On the other hand the nucleic acid molecules of the invention and the gene products are reduced, decreased or deleted to increase the productivity of the fine chemical.

[0351] In principle, the nucleic acid construct can comprise the herein described regulator sequences and further sequences relevant for the reduction of the expression of nucleic acid molecules of the invention and on the other side for the expression of additional genes in the construct. Thus, the nucleic acid construct of the invention can be used as expression cassette and thus can be used directly for introduction into the plant, or else they may be introduced into a vector. Accordingly in one embodiment the nucleic acid construct is an expression cassette comprising a microorganism promoter or a microorganism terminator or both. In another embodiment the expression cassette encompasses a plant promoter or a plant terminator or both.

[0352] Accordingly, in one embodiment, the process according to the invention comprises the following steps:
[0353] (a) introduction of a nucleic acid construct comprising the nucleic acid molecule of the invention, which encodes the polypeptide of the present invention; or
[0354] (b) introduction of a nucleic acid molecule, including regulatory sequences or factors, which expression decreases the expression of the polypeptide of the invention;
   in a cell, or an organism or a part thereof, preferably in a plant, plant cell or a microorganism, and
[0355] (c) repressing the polypeptide encoded by the nucleic acids of the invention by the nucleic acid construct or the nucleic acid molecule mentioned under (a) or (b) in the cell or the organism.

[0356] After the introduction and expression of the nucleic acid construct the transgenic organism or cell is advantageously cultured and subsequently harvested. The transgenic organism or cell may be a prokaryotic or eukaryotic organism such as a microorganism, a non-human animal and plant for example a plant or animal cell, a plant or animal tissue, preferably a crop plant, or a part thereof.

[0357] To introduce a nucleic acid molecule for example an RNAi, antisense nucleic acid sequence or a mutagenized nucleic acid sequence into a nucleic acid construct, e.g. as part of an expression cassette, which leads to a reduced activity and/or expression of the respective gene, the codogenic gene segment or the untranslated regions areas advantageously subjected to an amplification and ligation reaction in the manner known by a skilled person. It is preferred to follow a procedure similar to the protocol for the Pfu DNA polymerase or a Pfu/Taq DNA polymerase mixture. The primers are selected according to the sequence to be amplified. The primers should expediently be chosen in such a manner that the amplificate comprise at least the codogenic sequence from the start to the stop codon. Additional possibilities include the 5′ or 3′ untranslated regions or the promoter region. After the amplification, the amplificate is expediently analyzed. For example, the analysis may consider quality and quantity and be carried out following separation by gel electrophoresis. Thereafter, the amplificate can be purified following a standard protocol (for example Qiagen). An aliquot of the purified amplificate is then available for the subsequent cloning step. Suitable cloning vectors are generally known to the skilled worker [Cloning Vectors (Eds. Pouwels P. H. et al. Elsevier, Amsterdam-New York-Oxford, 1985, ISBN 0 444 904018)].

[0358] They include, in particular, vectors which are capable of replication in easy to handle cloning systems like bacterial yeast or insect cell based (e.g. baculovirus expression) systems, that is to say especially vectors which ensure efficient cloning in E. coli, and which make possible the stable transformation of plants. Vectors, which must be mentioned, in particular are various binary and cointegrated vector systems, which are suitable for the T-DNA-mediated transformation. Such vector systems are generally characterized in that they contain at least the vir genes, which are required for the Agrobacterium-mediated transformation, and the T-DNA border sequences.

[0359] In general, vector systems preferably also comprise further cis-regulatory regions such as promoters and terminators and/or selection markers by means of which suitably transformed organisms can be identified. While vir genes and T-DNA sequences are located on the same vector in the case of cointegrated vector systems, binary systems are based on at least two vectors, one of which bears vir genes, but no T-DNA, while a second one bears T-DNA, but no vir gene. Owing to this fact, the last-mentioned vectors are relatively small, easy to manipulate and capable of replication in E. coli and in Agrobacterium. These binary vectors include vectors from the series pBIB-HYG, pPZP, pBecks, pGreen. Those, which are preferably used in accordance with the invention, are Bin19, pBI101, pBinAR, pSun, pGPTV and pCAMBIA. An overview of binary vectors and their use is given by Hellens et al, Trends in Plant Science (2000) 5, 446-451.

[0360] For a vector preparation, vectors may first be linearized using restriction endonuclease(s) and then be modified enzymatically in a suitable manner. Thereafter, the vector is purified, and an aliquot is employed in the cloning step. In the cloning step, the enzyme-cleaved and, if required, purified amplificate is cloned together with similarly prepared vector fragments, using ligase. In this context, a specific nucleic acid construct, or vector or plasmid construct, may have one or else more codogenic gene segments. The codogenic gene segments in these constructs are preferably linked operably to regulatory sequences. The regulatory sequences include, in particular, plant sequences like the above-described promoters and terminators. The constructs can advantageously be propagated stably in microorganisms, in particular Escherichia coli and/or Agrobacterium tumefaciens, under selective conditions and enable the transfer of heterologous DNA into plants or other microorganisms. In accordance with a particular embodiment, the constructs are based on binary vectors (overview of a binary vector: Hellens et al., 2000). As a rule, they contain prokaryotic regulatory sequences, such as replication origin and selection markers, for the multiplication in microorganisms such as Escherichia coli and Agrobacterium tumefaciens. Vectors can further contain agrobacterial T-DNA sequences for the transfer of DNA into plant genomes or other eukaryotic regulatory sequences for transfer into other eukaryotic cells, e.g. Saccharomyces sp. or other prokaryotic regulatory sequences for the transfer into other prokaryotic cells, e.g. Corynebacterium sp. or Bacillus sp. For the transformation of plants, at least the right border sequence, which comprises approximately 25 base pairs, of the total agrobacterial T-DNA sequence is required. Usually, the plant transformation vector constructs according to the invention contain T-DNA sequences both from the right and from the left border region, which contain expedient recognition sites for site-specific acting enzymes, which, in turn, are encoded by some of the vir genes.

[0361] Suitable host organisms are known to the skilled worker. Advantageous organisms are described further above in the present application. They include in particular eukaryotes or eubacteria, e.g. prokaryotes or archae bacteria. Advantageously host organisms are microorganisms selected from the group consisting of Actinomycetaceae, Bacillaceae, Brevibacteriaceae, Corynebacteriaceae, Enterobacteriacae, Gordoniaceae, Micrococcaceae, Mycobacteriaceae, Nocardiaceae, Pseudomonaceae, Rhizobiaceae, Streptomycetaceae, Chaetomiaceae, Choanephoraceae, Cryptococcaceae, Cunninghamellaceae, Demetiaceae, Moniliaceae, Mortierellaceae, Mucoraceae, Pythiaceae, Sacharomycetaceae, Saprolegniaceae, Schizosacharomycetaceae, Sodariaceae, Sporobolomycetaceae, Tuberculariaceae, Adelotheciaceae, Dinophyceae, Ditrichaceae and Prasinophyceae. Preferably are unicellular microorganisms, e.g. fungi, bacteria or protoza, such as fungi like the genus Claviceps or Aspergillus or gram-positive bacteria such as the genera Bacillus, Corynebacterium, Micrococcus, Brevibacterium, Rhodococcus, Nocardia, Caseobacter or Arthrobacter or gram-negative bacteria such as the genera Escherichia, Flavobacterium or Salmonella, or yeasts such as the genera Rhodotorula, Hansenula, Pichia, Yerrowia, Saccharomyces, Schizosaccharomyces or Candida.

[0362] Host organisms which are especially advantageously selected in the process according to the invention are microorganisms selected from the group of the genera and species consisting of Hansenula anomala, Candida utilis, Claviceps purpurea, Bacillus circulans, Bacillus subtilis, Bacillus sp., Brevibacterium albidum, Brevibacterium album, Brevibacterium cerinum, Brevibacterium flavum, Brevibacterium glutamigenes, Brevibacterium iodinum, Brevibacterium ketoglutamicum, Brevibacterium lactofermentum, Brevibacterium linens, Brevibacterium roseum, Brevibacterium saccharolyticum, Brevibacterium sp., Corynebacterium acetoacidophilum, Corynebacterium acetoglutamicum, Corynebacterium ammoniagenes, Corynebacterium glutamicum (=Micrococcus glutamicum), Corynebacterium melassecola, Corynebacterium sp. or Escherichia coli, specifically Escherichia coli K12 and its described strains.

[0363] Advantageously preferred in accordance with the invention are host organisms of the genus Agrobacterium tumefaciens or plants. Preferred plants are selected from among the families Aceraceae, Anacardiaceae, Apiaceae, Asteraceae, Apiaceae, Betulaceae, Boraginaceae, Brassicaceae, Bromeliaceae, Cactaceae, Caricaceae, Caryophyllaceae, Cannabaceae, Convolvulaceae, Chenopodiaceae, Elaeagnaceae, Geraniaceae, Gramineae, Juglandaceae, Lauraceae, Leguminosae, Linaceae, Cucurbitaceae, Cyperaceae, Euphorbiaceae, Fabaceae, Malvaceae, Nymphaeaceae, Papaveraceae, Rosaceae, Salicaceae, Solanaceae, Arecaceae, Iridaceae, Liliaceae, Orchidaceae, Gentianaceae, Labiaceae, Magnoliaceae, Ranunculaceae, Carifolaceae, Rubiaceae, Scrophulariaceae, Ericaceae, Polygonaceae, Violaceae, Juncaceae, Poaceae, perennial grass, fodder crops, vegetables and ornamentals.

[0364] Especially preferred are plants selected from the groups of the families Apiaceae, Asteraceae, Brassicaceae, Cucurbitaceae, Fabaceae, Papaveraceae, Rosaceae, Solanaceae, Liliaceae or Poaceae. Especially advantageous are, in particular, crop plants. Accordingly, an advantageous plant preferably belongs to the group of the genus peanut, oilseed rape, canola, sunflower, safflower, olive, sesame, hazelnut, almond, avocado, bay, pumpkin/squash, linseed, soya, pistachio, borage, maize, wheat, rye, oats, sorghum and millet, triticale, rice, barley, cassava, potato, sugarbeet, fodder beet, egg plant, and perennial grasses and forage plants, oil palm, vegetables (brassicas, root vegetables, tuber vegetables, pod vegetables, fruiting vegetables, onion vegetables, leafy vegetables and stern vegetables), buckwheat, Jerusalem artichoke, broad bean, vetches, lentil, alfalfa, dwarf bean, lupin, clover and lucerne. Further preferred plants are mentioned above.

[0365] In order to introduce, into a plant, the nucleic acid molecule of the invention or used in the process according to the invention for example an RNAi, antisense nucleic acid sequence or a mutagenized nucleic acid sequence, it has proved advantageous first to transfer them into an intermediate host, for example a bacterium or a eukaryotic unicellular cell. The transformation into E. coli, which can be carried out in a manner known per se, for example by means of heat shock or electroporation, has proved itself expedient in this context. Thus, the transformed E. coli colonies can be analysed for their cloning efficiency. This can be carried out with the aid of a PCR. Here, not only the identity, but also the integrity, of the plasmid construct can be verified with the aid of a defined colony number by subjecting an aliquot of the colonies to said PCR. As a rule, universal primers which are derived from vector sequences are used for this purpose, it being possible, for example, for a forward primer to be arranged upstream of the start ATG and a reverse primer to be arranged downstream of the stop codon of the codogenic gene segment. The amplificates are separated by electrophoresis and assessed with regard to quantity and quality.

[0366] The nucleic acid constructs, which are optionally verified, are subsequently used for the transformation of the plants or other hosts, e.g. other eukaryotic cells or other prokaryotic cells. To this end, it may first be necessary to obtain the constructs from the intermediate host. For example, the constructs may be obtained as plasmids from bacterial hosts by a method similar to conventional plasmid isolation.

[0367] Gene silencing in plants can advantageously achieved by transient transformation technologies, meaning that the nucleic acids are preferably not integrated into the plant genome. Suitable systems for transient plant transformations are for example agrobacterium based and plant virus based systems. Details about virus based transient systems and their use for gene silencing in plants have been described in Lu et al. in Methods 2003, 30(4) 296-303. The use of agrobacterium for the transient expression of nucleic acids in plants have been described for example by Fuentes et al., 2003 in Biotechnol Appl Biochem. 2003 Nov. 21 online: doi: 10.1042/BA20030192).

[0368] A large number of methods for the transformation of plants are known. Since, in accordance with the invention, a stable integration of heterologous DNA into the genome of plants is advantageous, the T-DNA-mediated transformation has proved expedient in particular. For this purpose, it is first necessary to transform suitable vehicles, in particular agrobacteria, with a gene segment or the corresponding plasmid construct comprising the nucleic acid molecule of the invention. This can be carried out in a manner known per se. For example, said nucleic acid construct of the invention, or said expression construct or said plasmid construct, which has been generated in accordance with what has been detailed above, can be transformed into competent agrobacteria by means of electroporation or heat shock. In principle, one must differentiate between the formation of cointegrated vectors on the one hand and the transformation with binary vectors on the other hand. In the case of the first alternative, the constructs, which comprise the codogenic gene segment or the nucleic acid molecule of the invention have no T-DNA sequences, but the formation of the cointegrated vectors or constructs takes place in the agrobacteria by homologous recombination of the construct with T-DNA. The T-DNA is present in the agrobacteria in the form of Ti or Ri plasmids in which exogenous DNA has expediently replaced the oncogenes. If binary vectors are used, they can be transferred to agrobacteria either by bacterial conjugation or by direct transfer. These agrobacteria expediently already comprise the vector bearing the vir genes (currently referred to as helper Ti(Ri) plasmid).

[0369] In addition the stable transformation of plastids is of advantageous because plastids are inherited maternally in most crops reducing or eliminating the risk of transgene flow through pollen. The process of the transformation of the chloroplast genome is generally achieved by a process which has been schematically displayed in Klaus et al., 2004, Nature Biotechnology 22(2), 225-229).

[0370] Briefly the sequences to be transformed are cloned together with a selectable marker gene between flanking sequences homologous to the chloroplast genome. These homologous flanking sequences direct site specific intergration into the plastome. Plastidal transformation has been described for many different plant species and an overview can be taken from Bock et al. [(2001) Transgenic plastids in basic research and plant biotechnology. J Mol Biol. 2001 Sep. 21; 312(3):425-38] or Maliga, P [Progress towards commercialization of plastid transformation technology. Trends Biotechnol. 21, 20-28 (2003)]. Further biotechnological progress has recently been reported in form of marker free plastid transformants, which can be produced by a transient cointegrated maker gene [Klaus et al., 2004, Nature Biotechnology 22(2), 225-229].

[0371] One or more markers may expediently also be used together with the nucleic acid construct, or the vector of the invention and, if plants or plant cells shall be transformed together with the T-DNA, with the aid of which the isolation or selection of transformed organisms, such as agrobacteria or transformed plant cells, is possible. These marker genes enable the identification of a successful transfer of the nucleic acid molecules according to the invention via a series of different principles, for example via visual identification with the aid of fluorescence, luminescence or in the wavelength range of light which is discernible for the human eye, by a resistance to herbicides or antibiotics, via what are known as nutritive markers (auxotrophism markers) or antinutritive markers, via enzyme assays or via phytohormones. Examples of such markers which may be mentioned are GFP (=green fluorescent protein); the luciferin/luceferase system, the β-galactosidase with its colored substrates, for example X-Gal, the herbicide resistances to, for example, imidazolinone, glyphosate, phosphinothricin or sulfonylurea, the antibiotic resistances to, for example, bleomycin, hygromycin, streptomycin, kanamycin, tetracyclin, chloramphenicol, ampicillin, gentamycin, geneticin (G418), spectinomycin or blasticidin, to mention only a few, nutritive markers such as the utilization of mannose or xylose, or antinutritive markers such as the resistance to 2-deoxyglucose. This list is a small number of possible markers. The skilled worker is very familiar with such markers. Different markers are preferred, depending on the organism and the selection method.

[0372] As a rule, it is desired that the plant nucleic acid constructs be flanked by T-DNA at one or both sides of the gene segment. This is particularly useful when bacteria of the species Agrobacterium tumefaciens or Agrobacterium rhizogenes are used for the transformation. A method, which is preferred in accordance with the invention, is the transformation with the aid of Agrobacterium tumefaciens. However, biolistic methods may also be used advantageously for introducing the sequences in the process according to the invention, and the introduction by means of PEG is also possible. The transformed agrobacteria can be grown in the manner known per se and are thus available for the expedient transformation of the plants. The plants or plant parts to be transformed are grown or provided in the customary manner. The transformed agrobacteria are subsequently allowed to act on the plants or plant parts until a sufficient transformation rate is reached. Allowing the agrobacteria to act on the plants or plant parts can take different forms. For example, a culture of morphogenic plant cells or tissue may be used. After the T-DNA transfer, the bacteria are, as a rule, eliminated by antibiotics, and the regeneration of plant tissue is induced. This is done in particular using suitable plant hormones in order to initially induce callus formation and then to promote shoot development.

[0373] The transfer of foreign genes into the genome of a plant is called transformation. In doing this the methods described for the transformation and regeneration of plants from plant tissues or plant cells are utilized for transient or stable transformation. An advantageous transformation method is the transformation in planta. To this end, it is possible, for example, to allow the agrobacteria to act on plant seeds or to inoculate the plant meristem with agrobacteria. It has proved particularly expedient in accordance with the invention to allow a suspension of transformed agrobacteria to act on the intact plant or at least the flower primordia. The plant is subsequently grown on until the seeds of the treated plant are obtained (Clough and Bent, Plant J. (1998) 16, 735-743). To select transformed plants, the plant material obtained in the transformation is, as a rule, subjected to selective conditions so that transformed plants can be distinguished from untransformed plants. For example, the seeds obtained in the above-described manner can be planted and, after an initial growing period, subjected to a suitable selection by spraying. A further possibility consists in growing the seeds, if appropriate after sterilization, on agar plates using a suitable selection agent so that only the transformed seeds can grow into plants. Further advantageous transformation methods, in particular for plants, are known to the skilled worker and are described hereinbelow.

[0374] A further advantageously suitable methods are protoplast transformation by poly(ethylene glycol)-induced DNA uptake, the “biolistic” method using the gene cannon—referred to as the particle bombardment method, electroporation, the incubation of dry embryos in DNA solution, microinjection and gene transfer mediated by Agrobacterium. Said methods are described by way of example in B. Jenes et al., Techniques for Gene Transfer, in: Transgenic Plants, Vol. 1, Engineering and Utilization, eds. S. D. Kung and R. Wu, Academic Press (1993) 128-143 and in Potrykus Annu. Rev. Plant Physiol. Plant Molec. Biol. 42 (1991) 205-225). The nucleic acids or the construct to be expressed is preferably cloned into a vector, which is suitable for transforming Agrobacterium tumefaciens, for example pBin19 (Bevan et al., Nucl. Acids Res. 12 (1984) 8711). Agrobacteria transformed by such a vector can then be used in known manner for the transformation of plants, in particular of crop plants such as by way of example tobacco plants, for example by bathing bruised leaves or chopped leaves in an agrobacterial solution and then culturing them in suitable media. The transformation of plants by means of Agrobacterium tumefaciens is described, for example, by Höfgen and Willmitzer in Nucl. Acid Res. (1988) 16, 9877 or is known inter alia from F. F. White, Vectors for Gene Transfer in Higher Plants; in Transgenic Plants, Vol. 1, Engineering and Utilization, eds. S. D. Kung and R. Wu, Academic Press, 1993, pp. 15-38.

[0375] The abovementioned nucleic acid molecules can be cloned into the nucleic acid constructs or vectors according to the invention in combination together with further genes, or else different genes are introduced by transforming several nucleic acid constructs or vectors (including plasmids) into a host cell, advantageously into a plant cell or a microorganisms.

[0376] In addition to the sequence mentioned in SEQ ID NO: 1, SEQ ID NO: 3, SEQ ID NO: 5, SEQ ID NO: 7, SEQ ID NO: 9, SEQ ID NO: 11, SEQ ID NO: 13, SEQ ID NO: 15, SEQ ID NO: 19, SEQ ID NO: 21, SEQ ID NO: 23, SEQ ID NO: 25, SEQ ID NO: 27, SEQ ID NO: 29, SEQ ID NO: 31; SEQ ID NO: 64, SEQ ID NO: 66, SEQ ID NO: 68, SEQ ID NO: 70, SEQ ID NO: 72, SEQ ID NO: 74, SEQ ID NO: 76, SEQ ID NO: 78, SEQ ID NO: 80, SEQ ID NO: 82, SEQ ID NO: 84, SEQ ID NO: 86, SEQ ID NO: 88, SEQ ID NO: 90, SEQ ID NO: 92, SEQ ID NO: 94, SEQ ID NO: 96, SEQ ID NO: 98, SEQ ID NO: 100, SEQ ID NO: 102, SEQ ID NO: 104, SEQ ID NO: 106, SEQ ID NO: 108, SEQ ID NO: 110, SEQ ID NO: 112, SEQ ID NO: 114, SEQ ID NO: 116, SEQ ID NO: 118, SEQ ID NO: 120, SEQ ID NO: 122, SEQ ID NO: 124, SEQ ID NO: 126, SEQ ID NO: 128, SEQ ID NO: 130, SEQ ID NO: 132, SEQ ID NO: 134, SEQ ID NO: 136, SEQ ID NO: 138, SEQ ID NO: 140, SEQ ID NO: , SEQ ID NO: 142, SEQ ID NO: 151, SEQ ID NO: 153, SEQ ID NO: 155, SEQ ID NO: 157, SEQ ID NO: 159, SEQ ID NO: 161, SEQ ID NO: 163, SEQ ID NO: 165, SEQ ID NO: 167, SEQ ID NO: 169, SEQ ID NO: 171, SEQ ID NO: 173, SEQ ID NO: 175, SEQ ID NO: 177, SEQ ID NO: 179, SEQ ID NO: 181, SEQ ID NO: 183, SEQ ID NO: 185, SEQ ID NO: 187, SEQ ID NO: 189, SEQ ID NO: 191, SEQ ID NO: 193, SEQ ID NO: 195, SEQ ID NO: 197, SEQ ID NO: 199, SEQ ID NO: 201, SEQ ID NO: 203, SEQ ID NO: 205, SEQ ID NO: 207, SEQ ID NO: 209, SEQ ID NO: 211, SEQ ID NO: 213, SEQ ID NO: 215, SEQ ID NO: 217, SEQ ID NO: 219, SEQ ID NO: 228, SEQ ID NO: 230, SEQ ID NO: 232, SEQ ID NO: 234, SEQ ID NO: 236, SEQ ID NO: 238, SEQ ID NO: 240, SEQ ID NO: 242, SEQ ID NO: 249, SEQ ID NO: 251, SEQ ID NO: 253, SEQ ID NO: 255, SEQ ID NO: 257, SEQ ID NO: 259, SEQ ID NO: 261, SEQ ID NO: 263, SEQ ID NO: 265, SEQ ID NO: 267, SEQ ID NO: 269, SEQ ID NO: 271, SEQ ID NO: 282, SEQ ID NO: 284, SEQ ID NO: 286, SEQ ID NO: 288, SEQ ID NO: 290, SEQ ID NO: 292, SEQ ID NO: 294, SEQ ID NO: 296, SEQ ID NO: 298, SEQ ID NO: 300, SEQ ID NO: 302, SEQ ID NO: 304, SEQ ID NO: 306, SEQ ID NO: 308, SEQ ID NO: 310, SEQ ID NO: 312, SEQ ID NO: 314, SEQ ID NO: 316, SEQ ID NO: 318, SEQ ID NO: 320, SEQ ID NO: 322, SEQ ID NO: 324, SEQ ID NO: 326, SEQ ID NO: 328, SEQ ID NO: 330, SEQ ID NO: 332, SEQ ID NO: 334, SEQ ID NO: 336, SEQ ID NO: 338, SEQ ID NO: 340, SEQ ID NO: 342, SEQ ID NO: 344, SEQ ID NO: 346, SEQ ID NO: 348, SEQ ID NO: 350, SEQ ID NO: 352, SEQ ID NO: 354, SEQ ID NO: 356, SEQ ID NO: 358, SEQ ID NO: 360, SEQ ID NO: 362, SEQ ID NO: 364, SEQ ID NO: 366, SEQ ID NO: 368, SEQ ID NO: 370, SEQ ID NO: 372, SEQ ID NO: 374, SEQ ID NO: 376, SEQ ID NO: 378, SEQ ID NO: 380, SEQ ID NO: 382, SEQ ID NO: 384, SEQ ID NO: 386, SEQ ID NO: 388, SEQ ID NO: 390, SEQ ID NO: 392, SEQ ID NO: 394, SEQ ID NO: 396, SEQ ID NO: 398, SEQ ID NO: 400, SEQ ID NO: 402, SEQ ID NO: 404, SEQ ID NO: 406, SEQ ID NO: 408, SEQ ID NO: 410, SEQ ID NO: 412, SEQ ID NO: 414, SEQ ID NO: 416, SEQ ID NO: 418, SEQ ID NO: 420, SEQ ID NO: 422, SEQ ID NO: 424, SEQ ID NO: 426, SEQ ID NO: 428, SEQ ID NO: 430, SEQ ID NO: 432, SEQ ID NO: 434 or SEQ ID NO: 440 or its derivatives, it is advantageous additionally to express and/or mutate further genes in the organisms. Especially advantageously, additionally at least one further gene of the amino acid biosynthetic pathway such as for L-lysine, L-threonine and/or L-methionine is expressed in the organisms such as plants or microorganisms. It is also possible that the regulation of the natural genes has been modified advantageously so that the gene and/or its gene product is no longer subject to the regulatory mechanisms which exist in the organisms. This leads to an increased synthesis of the amino acids desired since, for example, feedback regulations no longer exist to the same extent or not at all. In addition it might be advantageously to combine the sequences SEQ ID NO: 1, SEQ ID NO: 3, SEQ ID NO: 5, SEQ ID NO: 7, SEQ ID NO: 9, SEQ ID NO: 11, SEQ ID NO: 13, SEQ ID NO: 15, SEQ ID NO: 19, SEQ ID NO: 21, SEQ ID NO: 23, SEQ ID NO: 25, SEQ ID NO: 27, SEQ ID NO: 29, SEQ ID NO: 31; SEQ ID NO: 64, SEQ ID NO: 66, SEQ ID NO: 68, SEQ ID NO: 70, SEQ ID NO: 72, SEQ ID NO: 74, SEQ ID NO: 76, SEQ ID NO: 78, SEQ ID NO: 80, SEQ ID NO: 82, SEQ ID NO: 84, SEQ ID NO: 86, SEQ ID NO: 88, SEQ ID NO: 90, SEQ ID NO: 92, SEQ ID NO: 94, SEQ ID NO: 96, SEQ ID NO: 98, SEQ ID NO: 100, SEQ ID NO: 102, SEQ ID NO: 104, SEQ ID NO: 106, SEQ ID NO: 108, SEQ ID NO: 110, SEQ ID NO: 112, SEQ ID NO: 114, SEQ ID NO: 116, SEQ ID NO: 118, SEQ ID NO: 120, SEQ ID NO: 122, SEQ ID NO: 124, SEQ ID NO: 126, SEQ ID NO: 128, SEQ ID NO: 130, SEQ ID NO: 132, SEQ ID NO: 134, SEQ ID NO: 136, SEQ ID NO: 138, SEQ ID NO: 140, SEQ ID NO: , SEQ ID NO: 142, SEQ ID NO: 151, SEQ ID NO: 153, SEQ ID NO: 155, SEQ ID NO: 157, SEQ ID NO: 159, SEQ ID NO: 161, SEQ ID NO: 163, SEQ ID NO: 165, SEQ ID NO: 167, SEQ ID NO: 169, SEQ ID NO: 171, SEQ ID NO: 173, SEQ ID NO: 175, SEQ ID NO: 177, SEQ ID NO: 179, SEQ ID NO: 181, SEQ ID NO: 183, SEQ ID NO: 185, SEQ ID NO: 187, SEQ ID NO: 189, SEQ ID NO: 191, SEQ ID NO: 193, SEQ ID NO: 195, SEQ ID NO: 197, SEQ ID NO: 199, SEQ ID NO: 201, SEQ ID NO: 203, SEQ ID NO: 205, SEQ ID NO: 207, SEQ ID NO: 209, SEQ ID NO: 211, SEQ ID NO: 213, SEQ ID NO: 215, SEQ ID NO: 217, SEQ ID NO: 219, SEQ ID NO: 228, SEQ ID NO: 230, SEQ ID NO: 232, SEQ ID NO: 234, SEQ ID NO: 236, SEQ ID NO: 238, SEQ ID NO: 240, SEQ ID NO: 242, SEQ ID NO: 249, SEQ ID NO: 251, SEQ ID NO: 253, SEQ ID NO: 255, SEQ ID NO: 257, SEQ ID NO: 259, SEQ ID NO: 261, SEQ ID NO: 263, SEQ ID NO: 265, SEQ ID NO: 267, SEQ ID NO: 269, SEQ ID NO: 271, SEQ ID NO: 282, SEQ ID NO: 284, SEQ ID NO: 286, SEQ ID NO: 288, SEQ ID NO: 290, SEQ ID NO: 292, SEQ ID NO: 294, SEQ ID NO: 296, SEQ ID NO: 298, SEQ ID NO: 300, SEQ ID NO: 302, SEQ ID NO: 304, SEQ ID NO: 306, SEQ ID NO: 308, SEQ ID NO: 310, SEQ ID NO: 312, SEQ ID NO: 314, SEQ ID NO: 316, SEQ ID NO: 318, SEQ ID NO: 320, SEQ ID NO: 322, SEQ ID NO: 324, SEQ ID NO: 326, SEQ ID NO: 328, SEQ ID NO: 330, SEQ ID NO: 332, SEQ ID NO: 334, SEQ ID NO: 336, SEQ ID NO: 338, SEQ ID NO: 340, SEQ ID NO: 342, SEQ ID NO: 344, SEQ ID NO: 346, SEQ ID NO: 348, SEQ ID NO: 350, SEQ ID NO: 352, SEQ ID NO: 354, SEQ ID NO: 356, SEQ ID NO: 358, SEQ ID NO: 360, SEQ ID NO: 362, SEQ ID NO: 364, SEQ ID NO: 366, SEQ ID NO: 368, SEQ ID NO: 370, SEQ ID NO: 372, SEQ ID NO: 374, SEQ ID NO: 376, SEQ ID NO: 378, SEQ ID NO: 380, SEQ ID NO: 382, SEQ ID NO: 384, SEQ ID NO: 386, SEQ ID NO: 388, SEQ ID NO: 390, SEQ ID NO: 392, SEQ ID NO: 394, SEQ ID NO: 396, SEQ ID NO: 398, SEQ ID NO: 400, SEQ ID NO: 402, SEQ ID NO: 404, SEQ ID NO: 406, SEQ ID NO: 408, SEQ ID NO: 410, SEQ ID NO: 412, SEQ ID NO: 414, SEQ ID NO: 416, SEQ ID NO: 418, SEQ ID NO: 420, SEQ ID NO: 422, SEQ ID NO: 424, SEQ ID NO: 426, SEQ ID NO: 428, SEQ ID NO: 430, SEQ ID NO: 432, SEQ ID NO: 434 or SEQ ID NO: 440, which are reduced in the biological activity, with genes which generally support or enhance the growth or yield of the target organism, for example genes which lead to faster a growth rate of the microorganisms or genes which for example produces stress-, pathogen, or herbicide resistant plants.

[0377] In a further embodiment of the process of the invention, therefore, organisms are grown, in which there is simultaneous overexpression of at least one nucleic acid or one of the genes which code for proteins selected from the group of gene products consisting of aspartate kinase (lysC), of aspartate-semialdehyde dehydrogenase (asd), of glyceraldehyde-3-phosphate dehydrogenase (gap), of 3-phosphoglycerate kinase (pgk), of pyruvate carboxylase (pyc), of triosephosphate isomerase (tpi), of homoserine O-acetyltransferase (metA>, of cystathionine γ-synthase (metB), of cystathionine gamma-lyase (metC), cystathionine β-lyase, of methionine synthase (metH), of serine hydroxymethyltransferase (glyA), of O-acetylhomoserine sulfhydrylase (metY), of methylenetetrahydrofolate reductase (metF), of phosphoserine aminotransferase (serC), of phosphoserine phosphatase (serB), of serine acetyltransferase (cysE), of cysteine synthase (cysK), of homoserine dehydrogenase (hom) and S-adenosylmethionine synthase (metX).

[0378] A further advantageous nucleic acid sequence, which can be expressed in combination with the sequences used in the process and/or the abovementioned biosynthesis genes is the sequence of the ATP/ADP translocator as described in WO 01/20009. This ATP/ADP translocator leads to an increased synthesis of the essential amino acids lysine and/or methionine.

[0379] In a further advantageous embodiment of the process of the invention, the organisms used in the process are those in which simultaneously at least one of the aforementioned genes or one of the aforementioned nucleic acids is mutated so that the activity of the corresponding proteins is influenced by metabolites to a smaller extent compared with the unmutated proteins, or not at all, and that in particular the production according to the invention of the amino acids is not impaired, or so that their specific enzymatic activity is increased. This increased activity of the genes, which are expressed in addition to the reduced, decreased or deleted activities of the nucleic acid sequences of the invention, leads to an increased production of the fine chemical. Less influence means in this connection that the regulation of the enzymic activity is less by at least 10%, advantageously at least 20, 30 or 40%, particularly advantageously by at least 50, 60 or 70%, compared with the starting organism, and thus the activity of the enzyme is increased by these figures mentioned compared with the starting organism. An increase in the enzymatic activity means an enzymatic activity which is increased by at least 10%, advantageously at least 20, 30 or 40%, particularly advantageously by at least 50, 60 or 70%, compared with the starting organism. This leads to an increased productivity of the fine chemical.

[0380] In a further advantageous embodiment of the process of the invention, the organisms used in the process are those in which simultaneously at least one of the genes selected from homoserine kinase (thrB), threonine dehydratase (ilvA), threonine synthase (thrC), meso-diaminopimelate D-dehydrogenase (ddh), phosphoenolpyruvate carboxykinase (pck), glucose-6-phosphate 6-isomerase (pgi), pyruvate oxidase (poxB), dihydrodipicolinate synthase (dapA), dihydrodipicolinate reductase (dapB) and diaminopicolinate decarboxylase (lysA) or a threonin degrading protein is attenuated, in particular by reducing the rate of expression of the corresponding gene.

[0381] In another embodiment of the process of the invention, the organisms used in the process are those in which simultaneously at least one of the aforementioned nucleic acids or of the aforementioned genes is mutated in such a way that the enzymatic activity of the corresponding protein is partially reduced or completely blocked. A reduction in the enzymatic activity means an enzymatic activity, which is reduced by at least 10%, advantageously at least 20, 30 or 40%, particularly advantageously by at least 50, 60 or 70%, preferably more, compared with the starting organism.

[0382] If it is intended to transform the host cell, in particular the plant cell, with several constructs or vectors, the marker of a preceding transformation must be removed or a further marker employed in a following transformation. The markers can be removed from the host cell, in particular the plant cell, as described hereinbelow via methods with which the skilled worker is familiar. In particular plants without a marker, in particular without resistance to antibiotics, are an especially preferred embodiment of the present invention.

[0383] In the process according to the invention, the nucleic acid sequences used in the process according to the invention are advantageously linked operably to one or more regulatory signals in order to increase gene expression for example if RNAi or antisense is used. These regulatory sequences are intended to enable the specific expression of the genes or gene fragments. Depending on the host organism for example plant or microorganism, this may mean, for example, that the gene or gene fragment is expressed and/or overexpressed after induction only, or that it is expressed and/or overexpressed constitutive. These regulatory sequences are, for example, sequences to which the inductors or repressors bind and which thus regulate the expression of the nucleic acid. In addition to these novel regulatory sequences, or instead of these sequences, the natural regulation of these sequences may still be present before the actual structural genes and, if appropriate, may have been genetically modified so that the natural regulation has been switched off and gene expression has been increased. However, the nucleic acid construct of the invention suitable as expression cassette (=expression construct=gene construct) can also be simpler in construction, that is to say no additional regulatory signals hare been inserted before the nucleic acid sequence or its derivatives, and the natural promoter together with its regulation has not been removed. Instead, the natural regulatory sequence has been mutated in such a way that regulation no longer takes place and/or gene expression is increased. These modified promoters can also be introduced on their own before the natural gene in the form of part sequences (=promoter with parts of the nucleic acid sequences according to the invention) in order to increase the activity. Moreover, the gene construct can advantageously also comprise one or more of what are known as enhancer sequences in operable linkage with the promoter, and these enable an increased expression of the nucleic acid sequence. Also, it is possible to insert additional advantageous sequences at the 3′ end of the DNA sequences, such as, for example, further regulatory elements or terminators.

[0384] The nucleic acid molecules, which encode proteins according to the invention and nucleic acid molecules, which encode other polypeptides may be present in one nucleic acid construct or vector or in several ones. Advantageously, only one copy of the nucleic acid molecule of the invention or its encoding genes is present in the nucleic acid construct or vector. Several vectors or nucleic acid construct or vector can be expressed together in the host organism. The nucleic acid molecule or the nucleic acid construct or vector according to the invention can be inserted in a vector and be present in the cell in a free form. If a stable transformation is preferred, a vector is used, which is stably duplicated over several generations or which is else be inserted into the genome. In the case of plants, integration into the plastid genome or, in particular, into the nuclear genome may have taken place. For the insertion of more than one gene in the host genome the genes to be expressed are present together in one gene construct, for example in above-described vectors bearing a plurality of genes.

[0385] As a rule, regulatory sequences for the expression rate of a gene are located upstream (5′), within, and/or downstream (3′) relative to the coding sequence of the nucleic acid molecule of the invention or another codogenic gene segment. They control in particular transcription and/or translation and/or the transcript stability. The expression level is dependent on the conjunction of further cellular regulatory systems, such as the protein biosynthesis and degradation systems of the cell.

[0386] Regulatory sequences include transcription and translation regulating sequences or signals, e.g. sequences located upstream (5′), which concern in particular the regulation of transcription or translation initiation, such as promoters or start codons, and sequences located downstream (3′), which concern in particular the regulation of transcription or translation termination and transcript stability, such as polyadenylation signals or stop codons. Regulatory sequences can also be present in transcribed coding regions as well in transcribed non-coding regions, e.g. in introns, as for example splicing sites.

[0387] Promoters for the regulation of expression of the nucleic acid molecule according to the invention in a cell and which can be employed are, in principle, all those which are capable of reducing the transcription of the nucleic acid molecules or stimulating the transcription of additional genes in the organisms in question, such as microorganisms or plants, depending on the goal, which should be reached by using said promoters. Suitable promoters, which are functional in these organisms, are generally known. They may take the form of constitutive or inducible promoters. Suitable promoters can enable the development- and/or tissue-specific expression in multi-celled eukaryotes; thus, leaf-, root-, flower-, seed-, stomata-, tuber- or fruit-specific promoters may advantageously be used in plants.

[0388] Advantageous regulatory sequences for the expression of the nucleic acid molecule according to the invention in microorganisms are present for example in promoters such as the cos, tac, rha, trp, tet, trp-tet, lpp, lac, lpp-lac, lacI^{q-}, T7, T5, T3, gal, trc, ara, SP6, λ-P_{R} or λ-P_{L} promoter, which are advantageously used in gram-negative bacteria. Further advantageous regulatory sequences are present for example in the gram-positive promoters amy, dnaK, xylS and SPO2, in the yeast or fungal promoters ADC1, MFa, AC, P-60, UASH, MCB, PHO, CYC1, GAPDH, TEF, rp28, ADH. Promoters, which are particularly advantageous, are constitutive, tissue or compartment specific and inducible promoters. In general, “promoter” is understood as meaning, in the present context, a regulatory sequence in a nucleic acid molecule, which mediates the expression of a coding sequence segment of a nucleic acid molecule. In general, the promoter is located upstream to the coding sequence segment. Some elements, for example expression-enhancing elements such as enhancer may, however, also be located downstream or even in the transcribed region.

[0389] In principle, it is possible to use natural promoters together with their regulatory sequences, such as those mentioned above, for the novel process. It is also possible advantageously to use synthetic promoters, either additionally or alone, in particular when they mediate seed-specific expression such as described in, for example, WO 99/16890.

[0390] The expression of the nucleic acid molecules used in the process may be desired alone or in combination with other genes or nucleic acids. Multiple nucleic acid molecules conferring repression or expression of advantageous genes, depending on the goal to be reached, can be introduced via the simultaneous transformation of several individual suitable nucleic acid constructs, i.e. expression constructs, or, preferably, by combining several expression cassettes on one construct. It is also possible to transform several vectors with in each case several expression cassettes stepwise into the recipient organism.

[0391] As described above, the transcription of the genes, which are in addition to the genes of the invention introduced should advantageously be terminated by suitable terminators at the 3′ end of the biosynthesis genes introduced (behind the stop codon). A terminator, which may be used for this purpose is, for example, the OCS1 terminator, the nos3 terminator or the 35S terminator. As is the case with the promoters, different terminator sequences should be used for each gene. Terminators, which are useful in microorganism are for example the fimA terminator, txn terminator or trp terminator. Such terminators can be rho-dependent or rho-independent.

[0392] Different plant promoters such as, for example, the USP, the LegB4-, the DC3 promoter or the ubiquitin promoter from parsley or other herein mentioned promoter and different terminators may advantageously be used in the nucleic acid construct. Further useful plant promoters are for example the maize ubiquitin promoter, the ScBV (Sugarcaine bacilliform virus) promoter, the lpt2 or lpt1-gene promoters from barley (WO 95/15389 and WO 95/23230) or those described in WO 99/16890 (promoters from the barley hordein-gene, the rice glutelin gene, the rice oryzin gene, the rice prolamin gene, the wheat gliadin gene, wheat glutelin gene, the maize zein gene, the oat glutelin gene, the Sorghum kasirin-gene, the rye secalin gene).

[0393] In order to ensure the stable integration, into the transgenic plant, of nucleic acid molecules used in the process according to the invention in combination with further biosynthesis genes over a plurality of generations, each of the coding regions used in the process should be expressed under the control of its own, preferably unique, promoter since repeating sequence motifs may lead to recombination events or to silencing or, in plants, to instability of the T-DNA.

[0394] The nucleic acid construct is advantageously constructed in such a way that a promoter is followed by a suitable cleavage site for insertion of the nucleic acid to be expressed, advantageously in a polylinker, followed, if appropriate, by a terminator located behind the polylinker. If appropriate, this order is repeated several times so that several genes are combined in one construct and thus can be introduced into the transgenic plant in order to be expressed. The sequence is advantageously repeated up to three times. For the expression, the nucleic acid sequences are inserted via the suitable cleavage site, for example in the polylinker behind the promoter. It is advantageous for each nucleic acid sequence to have its own promoter and, if appropriate, its own terminator, as mentioned above. However, it is also possible to insert several nucleic acid sequences behind a promoter and, if appropriate, before a terminator if a polycistronic transcription is possible in the host or target cells. In this context, the insertion site, or the sequence of the nucleic acid molecules inserted, in the nucleic acid construct is not decisive, that is to say a nucleic acid molecule can be inserted in the first or last position in the cassette without this having a substantial effect on the expression. However, it is also possible to use only one promoter type in the construct. However, this may lead to undesired recombination events or silencing effects, as said.

[0395] Accordingly, in a preferred embodiment, the nucleic acid construct according to the invention confers expression of the nucleic acid molecule of the invention, and, optionally further genes, in a plant and comprises one or more plant regulatory elements. Said nucleic acid construct according to the invention advantageously encompasses a plant promoter or a plant terminator or a plant promoter and a plant terminator.

[0396] A “plant” promoter comprises regulatory elements, which mediate the expression of a coding sequence segment in plant cells. Accordingly, a plant promoter need not be of plant origin, but may originate from viruses or microorganisms, in particular for example from viruses which attack plant cells.

[0397] The plant promoter can also originate from a plant cell, e.g. from the plant, which is transformed with the nucleic acid construct or vector as described herein. This also applies to other “plant” regulatory signals, for example in “plant” terminators.

[0398] A nucleic acid construct suitable for plant expression preferably comprises regulatory elements which are capable of controlling the expression of genes in plant cells and which are operably linked so that each sequence can fulfill its function. Accordingly, the nucleic acid construct can also comprise transcription terminators. Examples for transcriptional termination are polyadenylation signals. Preferred polyadenylation signals are those which originate from Agrobacterium tumefaciens T-DNA, such as the gene 3 of the Ti plasmid pTiACH5, which is known as octopine synthase (Gielen et al., EMBO J. 3 (1984) 835 et seq.) or functional equivalents thereof, but all the other terminators which are functionally active in plants are also suitable.

[0399] The nucleic acid construct suitable for plant expression preferably also comprises other operably linked regulatory elements such as translation enhancers, for example the overdrive sequence, which comprises the tobacco mosaic virus 5′-untranslated leader sequence, which increases the protein/RNA ratio (Gallie et al., 1987, Nucl. Acids Research 15:8693-8711).

[0400] For expression in plants, the nucleic acid molecule must, as described above, be linked operably to or comprise a suitable promotor which expresses the gene at the right point in time and in a cell- or tissue-specific manner. Usable promoters are constitutive promoters (Benfey et al., EMBO J. 8 (1989) 2195-2202), such as those which originate from plant viruses, such as 35S CAMV (Franck et al., Cell 21 (1980) 285-294), 19S CaMV (see also U.S. Pat. No. 5,352,605 and WO 84/02913), 34S FMV (Sanger et al., Plant. Mol. Biol., 14, 1990: 433-443), the parsley ubiquitin promoter, or plant promoters such as the Rubisco small subunit promoter described in U.S. Pat. No. 4,962,028 or the plant promoters PRP1 [Ward et al., Plant. Mol. Biol. 22 (1993)], SSU, PGEL1, OCS [Leisner (1988) Proc Natl Acad Sci USA 85(5): 2553-2557], lib4, usp, mas [Comai (1990) Plant Mol Biol 15 (3):373-381], STLS1, ScBV (Schenk (1999) Plant Mol Biol 39(6):1221-1230), B33, SAD1 or SAD2 (flax promoters, Jain et al., Crop Science, 39 (6), 1999: 1696-1701) or nos [Shaw et al. (1984) Nucleic Acids Res. 12(20):7831-7846]. Stable, constitutive expression of the proteins according to the invention in a plant can be advantageous. However, inducible expression of the polypeptide of the invention is advantageous, if a late expression before the harvest is of advantage, as metabolic manipulation may lead to plant growth retardation.

[0401] The expression of plant genes can also be facilitated as described above via a chemical inducible promoter (for a review, see Gatz 1997, Annu. Rev. Plant Physiol. Plant Mol. Biol., 48:89-108). Chemically inducible promoters are particularly suitable when it is desired to express the gene in a time-specific manner. Examples of such promoters are a salicylic acid inducible promoter (WO 95/19443), and abscisic acid-inducible promoter (EP 335 528), a tetracyclin-inducible promoter (Gatz et al. (1992) Plant J. 2, 397-404), a cyclohexanol- or ethanol-inducible promoter (WO 93/21334) or others as described herein.

[0402] Other suitable promoters are those which react to biotic or abiotic stress conditions, for example the pathogen-induced PRP1 gene promoter (Ward et al., Plant. Mol. Biol. 22 (1993) 361-366), the tomato heat-inducible hsp80 promoter (U.S. Pat. No. 5,187,267), the potato chill-inducible alpha-amylase promoter (WO 96/12814) or the wound-inducible pinII promoter (EP-A-0 375 091) or others as described herein.

[0403] Preferred promoters are in particular those which bring about gene expression in tissues and organs in which the biosynthesis of amino acids takes place, in seed cells, such as endosperm cells and cells of the developing embryo. Suitable promoters are the oilseed rape napin gene promoter (U.S. Pat. No. 5,608,152), the Vicia faba USP promoter (Baeumlein et al., Mol Gen Genet, 1991, 225 (3): 459-67), the Arabidopsis oleosin promoter (WO 98/45461), the Phaseolus vulgaris phaseolin promoter (U.S. Pat. No. 5,504,200), the Brassica Bce4 promoter (WO 91/13980), the bean arc5 promoter, the carrot DcG3 promoter, or the Legumin B4 promoter (LeB4; Baeumlein et al., 1992, Plant Journal, 2 (2): 233-9), and promoters which bring about the seed-specific expression in monocotyledonous plants such as maize, barley, wheat, rye, rice and the like. Advantageous seed-specific promoters are the sucrose binding protein promoter (WO 00/26388), the phaseolin promoter and the napin promoter. Suitable promoters which must be considered are the barley lpt2 or lpt1 gene promoter (WO 95/15389 and WO 95/23230), and the promoters described in WO 99/16890 (promoters from the barley hordein gene, the rice glutelin gene, the rice oryzin gene, the rice prolamin gene, the wheat gliadin gene, the wheat glutelin gene, the maize zein gene, the oat glutelin gene, the sorghum kasirin gene and the rye secalin gene). Further suitable promoters are Amy32b, Amy 6-6 and Aleurain [U.S. Pat. No. 5,677,474], Bce4 (oilseed rape) [U.S. Pat. No. 5,530,149], glycinin (soya) [EP 571 741], phosphoenolpyruvate carboxylase (soya) [JP 06/62870], ADR12-2 (soya) [WO 98/08962], isocitrate lyase (oilseed rape) [U.S. Pat. No. 5,689,040] or α-amylase (barley) [EP 781 849]. Other promoters which are available for the expression of genes in plants are leaf-specific promoters such as those described in DE-A 19644478 or light-regulated promoters such as, for example, the pea petE promoter.

[0404] Further suitable plant promoters are the cytosolic FBPase promoter or the potato ST-LSI promoter (Stockhaus et al., EMBO J. 8, 1989, 2445), the Glycine max phosphoribosylpyrophosphate amidotransferase promoter (GenBank Accession No. U87999) or the node-specific promoter described in EP-A-0 249 676.

[0405] Other promoters, which are particularly suitable are those which bring about plastid-specific expression. Suitable promoters such as the viral RNA polymerase promoter are described in WO 95/16783 and WO 97/06250, and the Arabidopsis cipP promoter, which is described in WO 99/46394.

[0406] Other promoters, which are used for the strong expression of heterologous sequences in as many tissues as possible, in particular also in leaves, are, in addition to several of the abovementioned viral and bacterial promoters, preferably, plant promoters of actin or ubiquitin genes such as, for example, the rice actin1 promoter. Further examples of constitutive plant promoters are the sugarbeet V-ATPase promoters (WO 01/14572). Examples of synthetic constitutive promoters are the Super promoter (WO 95/14098) and promoters derived from G-boxes (WO 94/12015). If appropriate, chemical inducible promoters may furthermore also be used, compare EP-A 388186, EP-A 335528, WO 97/06268.

[0407] Another embodiment of the invention is a nucleic acid construct conferring the expression of the dsRNA molecule, the antisense nucleic acid molecule, the ribozyme, the viral nucleic acid molecule or the nucleic acid molecule as used in the inventive process, suitable for the expression in microorganism or preferably in plant.

[0408] Preferred recipient plants are, as described above, in particular those plants, which can be transformed in a suitable manner. These include monocotyle-donous and dicotyledonous plants. Plants which must be mentioned in particular are agriculturally useful plants such as cereals and grasses, for example Triticum spp., Zea mays, Hordeum vulgare, oats, Secale cereale, Oryza sativa, Pennisetum glaucum, Sorghum bicolor, Triticale, Agrostis spp., Cenchrus ciliaris, Dactylis glomerata, Festuca arundinacea, Lolium spp., Medicago spp. and Saccharum spp., legumes and oil crops, for example Brassica juncea, Brassica napus, Glycine max, Arachis hypogaea, Gossypium hirsutum, Cicer arietinum, Helianthus annuus, Lens culinaris, Linum usitatissimum, Sinapis alba, Trifolium repens and Vicia narbonensis, vegetables and fruits, for example bananas, grapes, Lycopersicon esculentum, asparagus, cabbage, watermelons, kiwi fruit, Solanum tuberosum, Beta vulgaris, cassaya and chicory, trees, for example Coffea species, Citrus spp., Eucalyptus spp., Picea spp., Pinus spp. and Populus spp., medicinal plants and trees, and flowers.

[0409] One embodiment of the present invention also relates to a method for generating a vector, which comprises the insertion, into a vector, of the nucleic acid molecule characterized herein, the nucleic acid molecule according to the invention or the expression cassette according to the invention. The vector can, for example, be introduced into a cell, e.g. a microorganism or a plant cell, as described herein for the nucleic acid construct, or below under transformation or transfection or shown in the examples. A transient or stable transformation of the host or target cell is possible, however, a stable transformation is preferred.

[0410] The vector according to the invention is preferably a vector, which is suitable for reducing, decreasing or deleting of the polypeptide according to the invention in a plant. The method can thus also encompass one or more steps for integrating regulatory signals into the vector, in particular signals, which mediate the reduction, decrease or deletion in an organism such as a microorganism or plant.

[0411] Accordingly, the present invention also relates to a vector comprising the nucleic acid molecule characterized herein as part of a nucleic acid construct suitable for plant expression or the nucleic acid molecule according to the invention.

[0412] The advantageous vectors of the invention comprise the nucleic acid molecules which encode proteins according to the invention, nucleic acid molecules which are used in the process, or nucleic acid construct suitable for the expression in microorganism or plant as described above comprising the nucleic acid molecules used, either alone or in combination with further genes such as the biosynthesis or regulatory genes of the amino acid metabolism e.g. with the genes mentioned herein above. In accordance with the invention, the term “vector” refers to a nucleic acid molecule, which is capable of transporting another nucleic acid to which it is linked. One type of vector is a “plasmid”, which means a circular double-stranded DNA loop into which additional DNA segments can be ligated. A further type of vector is a viral vector, it being possible to ligate additional DNA segments into the viral genome. Certain vectors are capable of autonomous replication in a host cell into which they have been introduced (for example bacterial vectors with bacterial replication origin). Other preferred vectors are advantageously completely or partly integrated into the genome of a host cell when they are introduced into the host cell and thus replicate together with the host genome. Moreover, certain vectors are capable of controlling the expression of genes with which they are in operable linkage. In the present context, these vectors are referred to as “expression vectors”. As mentioned above, they are capable of autonomous replication or may be integrated partly or completely into the host genome. Expression vectors, which are suitable for DNA recombination techniques usually, take the form of plasmids. In the present description, “plasmid” and “vector” can be used interchangeably since the plasmid is the most frequently used form of a vector. However, the invention is also intended to encompass these other forms of expression vectors, such as viral vectors, which exert similar functions. The term vector is furthermore also to encompass other vectors which are known to the skilled worker, such as phages, viruses such as SV40, CMV, TMV, transposons, IS elements, phasmids, phagemids, cosmids, and linear or circular DNA.

[0413] The recombinant expression vectors which are advantageously used in the process comprise the nucleic acid molecules according to the invention or the nucleic acid construct according to the invention in a form which is suitable for repressing the nucleic acid molecules of the invention and/or in the same time expressing, in a host cell, additional genes, which are accompanied by the nucleic acid molecules according to the invention or described herein. Accordingly, the recombinant expression vectors comprise one or more regulatory signals selected on the basis of the host cells to be used for the expression, in operable linkage with the nucleic acid sequence to be expressed.

[0414] In a recombinant expression vector, “operable linkage” means that the nucleic acid molecule of interest is linked to the regulatory signals in such a way that expression of the genes is possible: they are linked to one another in such a way that the two sequences fulfill the predicted function assigned to the sequence (for example in an in-vitro transcription/translation system, or in a host cell if the vector is introduced into the host cell).

[0415] The term “regulatory sequence” is intended to comprise promoters, enhancers and other expression control elements (for example polyadenylation signals). These regulatory sequences are described, for example, in Goeddel: Gene Expression Technology Methods in Enzymology 185, Academic Press, San Diego, Calif. (1990), or see: Gruber and Crosby, in: Methods in Plant Molecular Biology and Biotechnology, CRC Press, Boca Raton, Fla., Ed.: Glick and Thompson, chapter 7, 89-108, including the references cited therein. Regulatory sequences encompass those, which control the constitutive expression of a nucleotide sequence in many types of host cells and those which control the direct expression of the nucleotide sequence in specific host cells only, and under specific conditions. The skilled worker knows that the design of the expression vector may depend on factors such as the selection of the host cell to be transformed, the extent to which the desired protein is expressed, and the like. A preferred selection of regulatory sequences is described above, for example promoters, terminators, enhancers and the like. The term regulatory sequence is to be considered as being encompassed by the term regulatory signal. Several advantageous regulatory sequences, in particular promoters and terminators are described above. In general, the regulatory sequences described as advantageous for nucleic acid construct suitable for expression are also applicable for vectors.

[0416] The recombinant expression vectors used can be designed specifically for the expression, in prokaryotic and/or eukaryotic cells, of nucleic acid molecules used in the process. This is advantageous since intermediate steps of the vector construction are frequently carried out in microorganisms for the sake of simplicity. For example, the genes according to the invention and other genes can be expressed in bacterial cells, insect cells (using baculovirus expression vectors), yeast cells and other fungal cells [Romanos (1992), Yeast 8:423-488; van den Hondel, (1991), in: More Gene Manipulations in Fungi, J. W. Bennet & L. L. Lasure, Ed., pp. 396-428: Academic Press: San Diego; and van den Hondel, C.A.M.J.J. (1991), in: Applied Molecular Genetics of Fungi, Peberdy, J. F., et al., Ed., pp. 1-28, Cambridge University Press: Cambridge], algae [Falciatore et al., 1999, Marine Biotechnology. 1, 3:239-251] using vectors and following a transformation method as described in WO 98/01572, and preferably in cells of multi-celled plants [see Schmidt, R. and Willmitzer, L. (1988) Plant Cell Rep.: 583-586; Plant Molecular Biology and Biotechnology, C Press, Boca Raton, Fla., chapter 6/7, pp. 71-119 (1993); F. F. White, in: Transgenic Plants, Bd. 1, Engineering and Utilization, Ed.: Kung and R. Wu, Academic Press (1993), 128-43; Potrykus, Annu. Rev. Plant Physiol. Plant Molec. Biol. 42 (1991), 205-225 (and references cited therein)]. Suitable host cells are furthermore discussed in Goeddel, Gene Expression Technology: Methods in Enzymology 185, Academic Press, San Diego, Calif. (1990). As an alternative, the sequence of the recombinant expression vector can be transcribed and translated in vitro, for example using T7 promotor-regulatory sequences and T7 polymerase.

[0417] In most cases, proteins can be expressed in prokaryotes using vectors comprising constitutive or inducible promoters, which control the expression of fusion proteins or nonfusion proteins. Typical fusion expression vectors are, inter alia, pGEX (Pharmacia Biotech Inc; Smith, D. B., and Johnson, K. S. (1988) Gene 67:31-40), pMAL (New England Biolabs, Beverly, Mass.) and pRIT5 (Pharmacia, Piscataway, N.J.), in which glutathione-S-transferase (GST), maltose-E-binding protein or protein A is fused with the recombinant target protein. Examples of suitable inducible nonfusion E. coli expression vectors are, inter alia, pTrc (Amann et al. (1988) Gene 69:301-315) and pET 11d [Studier et al., Gene Expression Technology: Methods in Enzymology 185, Academic Press, San Diego, Calif. (1990) 60-89]. The target gene expression of the pTrc vector is based on the transcription of a hybrid trp-lac fusion promoter by the host RNA polymerase. The target gene expression from the pET 11d vector is based on the transcription of a T7-gn10-lac fusion promoter, which is mediated by a coexpressed viral RNA polymerase (T7 gn1). This viral polymerase is provided by the host strains BL21 (DE3) or HMS174 (DE3) by a resident □-prophage, which harbors a T7 gn1 gene under the transcriptional control of the lacUV 5 promoter.

[0418] Other vectors which are suitable in prokaryotic organisms are known to the skilled worker; these vectors are for example in E. coli pLG338, pACYC184, the pBR series, such as pBR322, the pUC series such as pUC18 or pUC19, the M113mp series, pKC30, pRep4, pHS1, pHS2, pPLc236, pMBL24, pLG200, pUR290, pIN-III¹¹³-B1, □gt11 or pBdCl, in Streptomyces pIJ101, pIJ364, pIJ702 or pIJ361, in Bacillus pUB110, pC194 or pBD214, in Corynebacterium pSA77 or pAJ667.

[0419] In a further embodiment, the expression vector is a yeast expression vector. Examples of vectors for expression in the yeasts S. cerevisiae encompass pYeDesaturasec1 (Baldari et al. (1987) Embo J. 6:229-234), pMFa (Kurjan and Herskowitz (1982) Cell 30:933-943), pJRY88 (Schultz et al. (1987) Gene 54:113-123) and pYES2 (Invitrogen Corporation, San Diego, Calif.). Vectors and methods for the construction of vectors which are suitable for use in other fungi, such as the filamentous fungi, encompass those which are described in detail in: van den Hondel, C.A.M.J.J. [(1991), J. F. Peberdy, Ed., pp. 1-28, Cambridge University Press: Cambridge; or in: More Gene Manipulations in Fungi; J. W. Bennet & L. L. Lasure, Ed., pp. 396-428: Academic Press: San Diego]. Examples of other suitable yeast vectors are 2□M, pAG-1, YEp6, YEp13 or pEMBLYe23.

[0420] Further vectors, which may be mentioned by way of example, are pALS1, pIL2 or pBB116 in fungi or pLGV23, pGHlac⁺, pBIN19, pAK2004 or pDH51 in plants.

[0421] As an alternative, the nucleic acid sequences can be expressed in insect cells using baculovirus expression vectors. Baculovirus vectors which are available for expressing proteins in cultured insect cells (for example Sf9 cells) encompass the pAc series (Smith et al. (1983) Mol. Cell Biol. 3:2156-2165) and the pVL series (Lucklow and Summers (1989) Virology 170:31-39).

[0422] The abovementioned vectors are only a small overview of potentially suitable vectors. Further plasmids are known to the skilled worker and are described, for example, in: Cloning Vectors (Ed. Pouwels, P. H., et al., Elsevier, Amsterdam-New York-Oxford, 1985, ISBN 0 444 904018). Further suitable expression systems for prokaryotic and eukaryotic cells, see the chapters 16 and 17 by Sambrook, J., Fritsch, E. F., and Maniatis, T., Molecular Cloning: A Laboratory Manual, 2nd Edition, Cold Spring Harbor Laboratory, Cold Spring Harbor Laboratory Press, Cold Spring Harbor, N.Y., 1989.

[0423] Accordingly, one embodiment of the invention relates to a vector comprising the nucleic acid molecule according to the invention or a nucleic acid construct of the invention. Said vector is useful for the reduction, decrease or deletion of the polypeptide according to the invention in an organism preferably a plant. Advantageously the nucleic acid molecule of the invention is in an operable linkage with regulatory sequences for the expression in a prokaryotic or eukaryotic, or in a prokaryotic and eukaryotic host. Furthermore vectors which are suitable for homologous recombination are also within the scope of the invention.

[0424] Accordingly, one embodiment of the invention relates to a host cell, which has been transformed stably or transiently with the vector according to the invention or the nucleic acid molecule according to the invention or the nucleic acid construct according to the invention. Said host cell may be a microorganism, a non-human animal cell or a plant cell.

[0425] Depending on the host organism, the organisms used in the process according to the invention are cultured or grown in a manner with which the skilled worker is familiar. As a rule, microorganisms are grown in a liquid medium comprising a carbon source, usually in the form of sugars, a nitrogen source, usually in the form of organic nitrogen sources such as yeast extract or salts such as ammonium sulfate, trace elements such as iron salts, manganese salts, magnesium salts, and, if appropriate, vitamins, at temperatures between 0° C. and 100° C., preferably between 10° C. and 60° C., while passing in oxygen. In the event the microorganism is anaerobe, no oxygen is blown through the culture medium. The pH value of the liquid nutrient medium may be kept constant, that is to say regulated during the culturing phase, or not. The organisms may be cultured batchwise, semibatchwise or continuously. Nutrients may be provided at the beginning of the fermentation or fed in semi-continuously or continuously.

[0426] The amino acids produced can be isolated from the organism by methods with which the skilled worker is familiar. For example via extraction, salt precipitation and/or ion-exchange chromatography. To this end, the organisms may be disrupted beforehand. The process according to the invention can be conducted batchwise, semibatchwise or continuously. A summary of known culture and isolation techniques can be found in the textbook by Chmiel [Bioprozeβtechnik 1, Einführung in die Bioverfahrenstechnik (Gustav Fischer Verlag, Stuttgart, 1991)], Demain et al. (Industrial Microbiology and Biotechnology, second edition, ASM Press, Washington, D.C., 1999, ISBN 1-55581-128-0] or in the textbook by Storhas (Bioreaktoren und periphere Einrichtungen (Vieweg Verlag, Braunschweig/Wiesbaden, 1994)).

[0427] In one embodiment, the present invention relates to a polypeptide encoded by the nucleic acid molecule according to the present invention, preferably conferring an increase in the fine chemical content in an organism or cell after decreasing the expression or activity.

[0428] The present invention also relates to a process for the production of a polypeptide according to the present invention, the polypeptide being expressed in a host cell according to the invention, preferably in a microorganism, non-human animal cell or a transgenic plant cell.

[0429] In one embodiment, the nucleic acid molecule used in the process for the production of the polypeptide is derived from a microorganism, preferably from a prokaryotic or protozoic cell with a eukaryotic organism as host cell. E.g., in one embodiment the polypeptide is produced in a plant cell or plant with a nucleic acid molecule derived from a prokaryote or a fungus or an alga or another microorganism but not from plant.

[0430] The skilled worker knows that protein and DNA expressed in different organisms differ in many respects and properties, e.g. methylation, degradation and post-translational modification as for example glucosylation, phosphorylation, acetylation, myristoylation, ADP-ribosylation, farnesylation, carboxylation, sulfation, ubiquination, etc. though having the same coding sequence. Preferably, the cellular expression control of the corresponding protein differs accordingly in the control mechanisms controlling the activity and expression of an endogenous protein or another eukaryotic protein. One major difference between proteins expressed in prokaryotic or eukaryotic organism is the amount of glycosylation. For example in E. coli there are no glycosylated proteins. Proteins expressed in yeasts have high mannose content in the glycosylated proteins, whereas in plants the glycosylation pattern is complex.

[0431] The polypeptide of the present invention is preferably produced by recombinant DNA techniques. For example, a nucleic acid molecule encoding the protein is cloned into a vector (as described above), the vector is introduced into a host cell (as described above) and said polypeptide is expressed in the host cell. Said polypeptide can then be isolated from the cells by an appropriate purification scheme using standard protein purification techniques. Alternative to recombinant expression, the polypeptide or peptide of the present invention can be synthesized chemically using standard peptide synthesis techniques. Moreover, native polypeptide having the biological activity of the protein of the invention can be isolated from cells (e.g., endothelial cells), for example using the antibody of the present invention as described below, in particular, an anti-protein of the invention antibody, which can be produced by standard techniques utilizing the polypeptide of the present invention or fragment thereof, i.e., the polypeptide of this invention.

[0432] In one embodiment, the present invention relates to a polypeptide having the biological activity represented by the protein of the invention. In one embodiment, said polypeptide having the biological activity represented by the protein of the invention distinguishes over the sequence depicted in SEQ ID NO: 2, SEQ ID NO: 4, SEQ ID NO: 6, SEQ ID NO: 8, SEQ ID NO: 10, SEQ ID NO: 12, SEQ ID NO: 14, SEQ ID NO: 16, SEQ ID NO: 20, SEQ ID NO: 22, SEQ ID NO: 24, SEQ ID NO: 26, SEQ ID NO: 28, SEQ ID NO. 30, SEQ ID NO: 32; SEQ ID NO: 65, SEQ ID NO: 67, SEQ ID NO: 69, SEQ ID NO: 71, SEQ ID NO: 73, SEQ ID NO: 75, SEQ ID NO: 77, SEQ ID NO: 79, SEQ ID NO: 81, SEQ ID NO: 83, SEQ ID NO: 85, SEQ ID NO: 87, SEQ ID NO: 89, SEQ ID NO: 91, SEQ ID NO: 93, SEQ ID NO: 95, SEQ ID NO: 97, SEQ ID NO: 99, SEQ ID NO: 101, SEQ ID NO: 103, SEQ ID NO: 105, SEQ ID NO: 107, SEQ ID NO: 109, SEQ ID NO: 111, SEQ ID NO: 113, SEQ ID NO: 115, SEQ ID NO: 117, SEQ ID NO: 119, SEQ ID NO: 121, SEQ ID NO: 123, SEQ ID NO: 125, SEQ ID NO: 127, SEQ ID NO: 129, SEQ ID NO: 131, SEQ ID NO: 133, SEQ ID NO: 135, SEQ ID NO: 137, SEQ ID NO: 139, SEQ ID NO: 141, SEQ ID NO: 143, SEQ ID NO: 152, SEQ ID NO: 154, SEQ ID NO: 156, SEQ ID NO: 158, SEQ ID NO: 160, SEQ ID NO: 162, SEQ ID NO: 164, SEQ ID NO: 166, SEQ ID NO: 168, SEQ ID NO: 170, SEQ ID NO: 172, SEQ ID NO: 174, SEQ ID NO: 176, SEQ ID NO: 178, SEQ ID NO: 180, SEQ ID NO: 182, SEQ ID NO: 184, SEQ ID NO: 186, SEQ ID NO: 188, SEQ ID NO: 190, SEQ ID NO: 192, SEQ ID NO: 194, SEQ ID NO: 196, SEQ ID NO: 198, SEQ ID NO: 200, SEQ ID NO: 202, SEQ ID NO: 204, SEQ ID NO: 206, SEQ ID NO: 208, SEQ ID NO: 210, SEQ ID NO: 212, SEQ ID NO: 214, SEQ ID NO: 216, SEQ ID NO: 218, SEQ ID NO: 220, SEQ ID NO: 229, SEQ ID NO:231, SEQ ID NO:233, SEQ ID NO: 235, SEQ ID NO: 237, SEQ ID NO: 239, SEQ ID NO: 241, SEQ ID NO: 243, SEQ ID NO: 250, SEQ ID NO: 252, SEQ ID NO: 254, SEQ ID NO: 256, SEQ ID NO: 258, SEQ ID NO: 260, SEQ ID NO: 262, SEQ ID NO: 264, SEQ ID NO: 266, SEQ ID NO: 268, SEQ ID NO: 270, SEQ ID NO: 272, SEQ ID NO: 283, SEQ ID NO: 285, SEQ ID NO: 287, SEQ ID NO: 289, SEQ ID NO: 291, SEQ ID NO: 293, SEQ ID NO: 295, SEQ ID NO: 297, SEQ ID NO: 299, SEQ ID NO: 301, SEQ ID NO: 303, SEQ ID NO: 305, SEQ ID NO: 307, SEQ ID NO: 309, SEQ ID NO: 311, SEQ ID NO: 313, SEQ ID NO: 315, SEQ ID NO: 317, SEQ ID NO: 319, SEQ ID NO: 321, SEQ ID NO: 323, SEQ ID NO: 325, SEQ ID NO: 327, SEQ ID NO: 329, SEQ ID NO: 331, SEQ ID NO: 333, SEQ ID NO: 335, SEQ ID NO: 337, SEQ ID NO: 339, SEQ ID NO: 341, SEQ ID NO: 343, SEQ ID NO: 345, SEQ ID NO: 347, SEQ ID NO: 349, SEQ ID NO: 351, SEQ ID NO: 353, SEQ ID NO: 355, SEQ ID NO: 357, SEQ ID NO: 359, SEQ ID NO: 361, SEQ ID NO: 363, SEQ ID NO: 365, SEQ ID NO: 367, SEQ ID NO: 369, SEQ ID NO: 371, SEQ ID NO: 373, SEQ ID NO: 375, SEQ ID NO: 377, SEQ ID NO: 379, SEQ ID NO: 381, SEQ ID NO: 383, SEQ ID NO: 385, SEQ ID NO: 387, SEQ ID NO: 389, SEQ ID NO: 391, SEQ ID NO: 393, SEQ ID NO: 395, SEQ ID NO: 397, SEQ ID NO: 399, SEQ ID NO: 401, SEQ ID NO: 403, SEQ ID NO: 405, SEQ ID NO: 407, SEQ ID NO: 409, SEQ ID NO: 411, SEQ ID NO: 413, SEQ ID NO: 415, SEQ ID NO: 417, SEQ ID NO: 419, SEQ ID NO: 421, SEQ ID NO: 423, SEQ ID NO: 425, SEQ ID NO: 427, SEQ ID NO: 429, SEQ ID NO: 431, SEQ ID NO: 433, SEQ ID NO: 435 or SEQ ID NO: 441 by one or more amino acids. In another embodiment, said polypeptide of the invention does not consist of the sequence shown in SEQ ID NO: 2, SEQ ID NO: 4, SEQ ID NO: 6, SEQ ID NO: 8, SEQ ID NO: 10, SEQ ID NO: 12, SEQ ID NO: 14, SEQ ID NO: 16, SEQ ID NO: 20, SEQ ID NO: 22, SEQ ID NO: 24, SEQ ID NO: 26, SEQ ID NO: 28, SEQ ID NO. 30, SEQ ID NO: 32; SEQ ID NO: 65, SEQ ID NO: 67, SEQ ID NO: 69, SEQ ID NO: 71, SEQ ID NO: 73, SEQ ID NO: 75, SEQ ID NO: 77, SEQ ID NO: 79, SEQ ID NO: 81, SEQ ID NO: 83, SEQ ID NO: 85, SEQ ID NO: 87, SEQ ID NO: 89, SEQ ID NO: 91, SEQ ID NO: 93, SEQ ID NO: 95, SEQ ID NO: 97, SEQ ID NO: 99, SEQ ID NO: 101, SEQ ID NO: 103, SEQ ID NO: 105, SEQ ID NO: 107, SEQ ID NO: 109, SEQ ID NO: 111, SEQ ID NO: 113, SEQ ID NO: 115, SEQ ID NO: 117, SEQ ID NO: 119, SEQ ID NO: 121, SEQ ID NO: 123, SEQ ID NO: 125, SEQ ID NO: 127, SEQ ID NO: 129, SEQ ID NO: 131, SEQ ID NO: 133, SEQ ID NO: 135, SEQ ID NO: 137, SEQ ID NO: 139, SEQ ID NO: 141, SEQ ID NO: 143, SEQ ID NO: 152, SEQ ID NO: 154, SEQ ID NO: 156, SEQ ID NO: 158, SEQ ID NO: 160, SEQ ID NO: 162, SEQ ID NO: 164, SEQ ID NO: 166, SEQ ID NO: 168, SEQ ID NO: 170, SEQ ID NO: 172, SEQ ID NO: 174, SEQ ID NO: 176, SEQ ID NO: 178, SEQ ID NO: 180, SEQ ID NO: 182, SEQ ID NO: 184, SEQ ID NO: 186, SEQ ID NO: 188, SEQ ID NO: 190, SEQ ID NO: 192, SEQ ID NO: 194, SEQ ID NO: 196, SEQ ID NO: 198, SEQ ID NO: 200, SEQ ID NO: 202, SEQ ID NO: 204, SEQ ID NO: 206, SEQ ID NO: 208, SEQ ID NO: 210, SEQ ID NO: 212, SEQ ID NO: 214, SEQ ID NO: 216, SEQ ID NO: 218, SEQ ID NO: 220, SEQ ID NO: 229, SEQ ID NO:231, SEQ ID NO:233, SEQ ID NO: 235, SEQ ID NO: 237, SEQ ID NO: 239, SEQ ID NO: 241, SEQ ID NO: 243, SEQ ID NO: 250, SEQ ID NO: 252, SEQ ID NO: 254, SEQ ID NO: 256, SEQ ID NO: 258, SEQ ID NO: 260, SEQ ID NO: 262, SEQ ID NO: 264, SEQ ID NO: 266, SEQ ID NO: 268, SEQ ID NO: 270, SEQ ID NO: 272, SEQ ID NO: 283, SEQ ID NO: 285, SEQ ID NO: 287, SEQ ID NO: 289, SEQ ID NO: 291, SEQ ID NO: 293, SEQ ID NO: 295, SEQ ID NO: 297, SEQ ID NO: 299, SEQ ID NO: 301, SEQ ID NO: 303, SEQ ID NO: 305, SEQ ID NO: 307, SEQ ID NO: 309, SEQ ID NO: 311, SEQ ID NO: 313, SEQ ID NO: 315, SEQ ID NO: 317, SEQ ID NO: 319, SEQ ID NO: 321, SEQ ID NO: 323, SEQ ID NO: 325, SEQ ID NO: 327, SEQ ID NO: 329, SEQ ID NO: 331, SEQ ID NO: 333, SEQ ID NO: 335, SEQ ID NO: 337, SEQ ID NO: 339, SEQ ID NO: 341, SEQ ID NO: 343, SEQ ID NO: 345, SEQ ID NO: 347, SEQ ID NO: 349, SEQ ID NO: 351, SEQ ID NO: 353, SEQ ID NO: 355, SEQ ID NO: 357, SEQ ID NO: 359, SEQ ID NO: 361, SEQ ID NO: 363, SEQ ID NO: 365, SEQ ID NO: 367, SEQ ID NO: 369, SEQ ID NO: 371, SEQ ID NO: 373, SEQ ID NO: 375, SEQ ID NO: 377, SEQ ID NO: 379, SEQ ID NO: 381, SEQ ID NO: 383, SEQ ID NO: 385, SEQ ID NO: 387, SEQ ID NO: 389, SEQ ID NO: 391, SEQ ID NO: 393, SEQ ID NO: 395, SEQ ID NO: 397, SEQ ID NO: 399, SEQ ID NO: 401, SEQ ID NO: 403, SEQ ID NO: 405, SEQ ID NO: 407, SEQ ID NO: 409, SEQ ID NO: 411, SEQ ID NO: 413, SEQ ID NO: 415, SEQ ID NO: 417, SEQ ID NO: 419, SEQ ID NO: 421, SEQ ID NO: 423, SEQ ID NO: 425, SEQ ID NO: 427, SEQ ID NO: 429, SEQ ID NO: 431, SEQ ID NO: 433, SEQ ID NO: 435 or SEQ ID NO: 441. In a further embodiment, said polypeptide of the present invention is less than 100%, 99.999%, 99.99%, 99.9% or 99% identical identical to SEQ ID NO: 2, SEQ ID NO: 4, SEQ ID NO: 6, SEQ ID NO: 8, SEQ ID NO: 10, SEQ ID NO: 12, SEQ ID NO: 14, SEQ ID NO: 16, SEQ ID NO: 20, SEQ ID NO: 22, SEQ ID NO: 24, SEQ ID NO: 26, SEQ ID NO: 28, SEQ ID NO. 30, SEQ ID NO: 32; SEQ ID NO: 65, SEQ ID NO: 67, SEQ ID NO: 69, SEQ ID NO: 71, SEQ ID NO: 73, SEQ ID NO: 75, SEQ ID NO: 77, SEQ ID NO: 79, SEQ ID NO: 81, SEQ ID NO: 83, SEQ ID NO: 85, SEQ ID NO: 87, SEQ ID NO: 89, SEQ ID NO: 91, SEQ ID NO: 93, SEQ ID NO: 95, SEQ ID NO: 97, SEQ ID NO: 99, SEQ ID NO: 101, SEQ ID NO: 103, SEQ ID NO: 105, SEQ ID NO: 107, SEQ ID NO: 109, SEQ ID NO: 111, SEQ ID NO: 113, SEQ ID NO: 115, SEQ ID NO: 117, SEQ ID NO: 119, SEQ ID NO: 121, SEQ ID NO: 123, SEQ ID NO: 125, SEQ ID NO: 127, SEQ ID NO: 129, SEQ ID NO: 131, SEQ ID NO: 133, SEQ ID NO: 135, SEQ ID NO: 137, SEQ ID NO: 139, SEQ ID NO: 141, SEQ ID NO: 143, SEQ ID NO: 152, SEQ ID NO: 154, SEQ ID NO: 156, SEQ ID NO: 158, SEQ ID NO: 160, SEQ ID NO: 162, SEQ ID NO: 164, SEQ ID NO: 166, SEQ ID NO: 168, SEQ ID NO: 170, SEQ ID NO: 172, SEQ ID NO: 174, SEQ ID NO: 176, SEQ ID NO: 178, SEQ ID NO: 180, SEQ ID NO: 182, SEQ ID NO: 184, SEQ ID NO: 186, SEQ ID NO: 188, SEQ ID NO: 190, SEQ ID NO: 192, SEQ ID NO: 194, SEQ ID NO: 196, SEQ ID NO: 198, SEQ ID NO: 200, SEQ ID NO: 202, SEQ ID NO: 204, SEQ ID NO: 206, SEQ ID NO: 208, SEQ ID NO: 210, SEQ ID NO: 212, SEQ ID NO: 214, SEQ ID NO: 216, SEQ ID NO: 218, SEQ ID NO: 220, SEQ ID NO: 229, SEQ ID NO:231, SEQ ID NO:233, SEQ ID NO: 235, SEQ ID NO: 237, SEQ ID NO: 239, SEQ ID NO: 241, SEQ ID NO: 243, SEQ ID NO: 250, SEQ ID NO: 252, SEQ ID NO: 254, SEQ ID NO: 256, SEQ ID NO: 258, SEQ ID NO: 260, SEQ ID NO: 262, SEQ ID NO: 264, SEQ ID NO: 266, SEQ ID NO: 268, SEQ ID NO: 270, SEQ ID NO: 272, SEQ ID NO: 283, SEQ ID NO: 285, SEQ ID NO: 287, SEQ ID NO: 289, SEQ ID NO: 291, SEQ ID NO: 293, SEQ ID NO: 295, SEQ ID NO: 297, SEQ ID NO: 299, SEQ ID NO: 301, SEQ ID NO: 303, SEQ ID NO: 305, SEQ ID NO: 307, SEQ ID NO: 309, SEQ ID NO: 311, SEQ ID NO: 313, SEQ ID NO: 315, SEQ ID NO: 317, SEQ ID NO: 319, SEQ ID NO: 321, SEQ ID NO: 323, SEQ ID NO: 325, SEQ ID NO: 327, SEQ ID NO: 329, SEQ ID NO: 331, SEQ ID NO: 333, SEQ ID NO: 335, SEQ ID NO: 337, SEQ ID NO: 339, SEQ ID NO: 341, SEQ ID NO: 343, SEQ ID NO: 345, SEQ ID NO: 347, SEQ ID NO: 349, SEQ ID NO: 351, SEQ ID NO: 353, SEQ ID NO: 355, SEQ ID NO: 357, SEQ ID NO: 359, SEQ ID NO: 361, SEQ ID NO: 363, SEQ ID NO: 365, SEQ ID NO: 367, SEQ ID NO: 369, SEQ ID NO: 371, SEQ ID NO: 373, SEQ ID NO: 375, SEQ ID NO: 377, SEQ ID NO: 379, SEQ ID NO: 381, SEQ ID NO: 383, SEQ ID NO: 385, SEQ ID NO: 387, SEQ ID NO: 389, SEQ ID NO: 391, SEQ ID NO: 393, SEQ ID NO: 395, SEQ ID NO: 397, SEQ ID NO: 399, SEQ ID NO: 401, SEQ ID NO: 403, SEQ ID NO: 405, SEQ ID NO: 407, SEQ ID NO: 409, SEQ ID NO: 411, SEQ ID NO: 413, SEQ ID NO: 415, SEQ ID NO: 417, SEQ ID NO: 419, SEQ ID NO: 421, SEQ ID NO: 423, SEQ ID NO: 425, SEQ ID NO: 427, SEQ ID NO: 429, SEQ ID NO: 431, SEQ ID NO: 433, SEQ ID NO: 435 or SEQ ID NO: 441.

[0433] In one embodiment, the present invention relates to a polypeptide having the amino acid sequence encoded by a nucleic acid molecule of the invention or obtainable by a process of the invention. Said polypeptide confers preferably the aforementioned activity, in particular, the polypeptide confers the increase of the fine chemical in a cell or an organism or a part thereof after decreasing the cellular activity, e.g. by decreasing the expression or the specific activity of the polypeptide.

[0434] In one embodiment, said polypeptide distinguishes over the sequence depicted in SEQ ID NO: 2, SEQ ID NO: 4, SEQ ID NO: 6, SEQ ID NO: 8, SEQ ID NO: 10, SEQ ID NO: 12, SEQ ID NO: 14, SEQ ID NO: 16, SEQ ID NO: 20, SEQ ID NO: 22, SEQ ID NO: 24, SEQ ID NO: 26, SEQ ID NO: 28, SEQ ID NO. 30, SEQ ID NO: 32; SEQ ID NO: 65, SEQ ID NO: 67, SEQ ID NO: 69, SEQ ID NO: 71, SEQ ID NO: 73, SEQ ID NO: 75, SEQ ID NO: 77, SEQ ID NO: 79, SEQ ID NO: 81, SEQ ID NO: 83, SEQ ID NO: 85, SEQ ID NO: 87, SEQ ID NO: 89, SEQ ID NO: 91, SEQ ID NO: 93, SEQ ID NO: 95, SEQ ID NO: 97, SEQ ID NO: 99, SEQ ID NO: 101, SEQ ID NO: 103, SEQ ID NO: 105, SEQ ID NO: 107, SEQ ID NO: 109, SEQ ID NO: 111, SEQ ID NO: 113, SEQ ID NO: 115, SEQ ID NO: 117, SEQ ID NO: 119, SEQ ID NO: 121, SEQ ID NO: 123, SEQ ID NO: 125, SEQ ID NO: 127, SEQ ID NO: 129, SEQ ID NO: 131, SEQ ID NO: 133, SEQ ID NO: 135, SEQ ID NO: 137, SEQ ID NO: 139, SEQ ID NO: 141, SEQ ID NO: 143, SEQ ID NO: 152, SEQ ID NO: 154, SEQ ID NO: 156, SEQ ID NO: 158, SEQ ID NO: 160, SEQ ID NO: 162, SEQ ID NO: 164, SEQ ID NO: 166, SEQ ID NO: 168, SEQ ID NO: 170, SEQ ID NO: 172, SEQ ID NO: 174, SEQ ID NO: 176, SEQ ID NO: 178, SEQ ID NO: 180, SEQ ID NO: 182, SEQ ID NO: 184, SEQ ID NO: 186, SEQ ID NO: 188, SEQ ID NO: 190, SEQ ID NO: 192, SEQ ID NO: 194, SEQ ID NO: 196, SEQ ID NO: 198, SEQ ID NO: 200, SEQ ID NO: 202, SEQ ID NO: 204, SEQ ID NO: 206, SEQ ID NO: 208, SEQ ID NO: 210, SEQ ID NO: 212, SEQ ID NO: 214, SEQ ID NO: 216, SEQ ID NO: 218, SEQ ID NO: 220, SEQ ID NO: 229, SEQ ID NO:231, SEQ ID NO:233, SEQ ID NO: 235, SEQ ID NO: 237, SEQ ID NO: 239, SEQ ID NO: 241, SEQ ID NO: 243, SEQ ID NO: 250, SEQ ID NO: 252, SEQ ID NO: 254, SEQ ID NO: 256, SEQ ID NO: 258, SEQ ID NO: 260, SEQ ID NO: 262, SEQ ID NO: 264, SEQ ID NO: 266, SEQ ID NO: 268, SEQ ID NO: 270, SEQ ID NO: 272, SEQ ID NO: 283, SEQ ID NO: 285, SEQ ID NO: 287, SEQ ID NO: 289, SEQ ID NO: 291, SEQ ID NO: 293, SEQ ID NO: 295, SEQ ID NO: 297, SEQ ID NO: 299, SEQ ID NO: 301, SEQ ID NO: 303, SEQ ID NO: 305, SEQ ID NO: 307, SEQ ID NO: 309, SEQ ID NO: 311, SEQ ID NO: 313, SEQ ID NO: 315, SEQ ID NO: 317, SEQ ID NO: 319, SEQ ID NO: 321, SEQ ID NO: 323, SEQ ID NO: 325, SEQ ID NO: 327, SEQ ID NO: 329, SEQ ID NO: 331, SEQ ID NO: 333, SEQ ID NO: 335, SEQ ID NO: 337, SEQ ID NO: 339, SEQ ID NO: 341, SEQ ID NO: 343, SEQ ID NO: 345, SEQ ID NO: 347, SEQ ID NO: 349, SEQ ID NO: 351, SEQ ID NO: 353, SEQ ID NO: 355, SEQ ID NO: 357, SEQ ID NO: 359, SEQ ID NO: 361, SEQ ID NO: 363, SEQ ID NO: 365, SEQ ID NO: 367, SEQ ID NO: 369, SEQ ID NO: 371, SEQ ID NO: 373, SEQ ID NO: 375, SEQ ID NO: 377, SEQ ID NO: 379, SEQ ID NO: 381, SEQ ID NO: 383, SEQ ID NO: 385, SEQ ID NO: 387, SEQ ID NO: 389, SEQ ID NO: 391, SEQ ID NO: 393, SEQ ID NO: 395, SEQ ID NO: 397, SEQ ID NO: 399, SEQ ID NO: 401, SEQ ID NO: 403, SEQ ID NO: 405, SEQ ID NO: 407, SEQ ID NO: 409, SEQ ID NO: 411, SEQ ID NO: 413, SEQ ID NO: 415, SEQ ID NO: 417, SEQ ID NO: 419, SEQ ID NO: 421, SEQ ID NO: 423, SEQ ID NO: 425, SEQ ID NO: 427, SEQ ID NO: 429, SEQ ID NO: 431, SEQ ID NO: 433, SEQ ID NO: 435 or SEQ ID NO: 441 by one or more amino acids. Preferably, the sequence of the polypeptide of the invention distinguishes from the sequence shown in SEQ ID NO: 2, SEQ ID NO: 4, SEQ ID NO: 6, SEQ ID NO: 8, SEQ ID NO: 10, SEQ ID NO: 12, SEQ ID NO: 14, SEQ ID NO: 16, SEQ ID NO: 20, SEQ ID NO: 22, SEQ ID NO: 24, SEQ ID NO: 26, SEQ ID NO: 28, SEQ ID NO. 30, SEQ ID NO: 32; SEQ ID NO: 65, SEQ ID NO: 67, SEQ ID NO: 69, SEQ ID NO: 71, SEQ ID NO: 73, SEQ ID NO: 75, SEQ ID NO: 77, SEQ ID NO: 79, SEQ ID NO: 81, SEQ ID NO: 83, SEQ ID NO: 85, SEQ ID NO: 87, SEQ ID NO: 89, SEQ ID NO: 91, SEQ ID NO: 93, SEQ ID NO: 95, SEQ ID NO: 97, SEQ ID NO: 99, SEQ ID NO: 101, SEQ ID NO: 103, SEQ ID NO: 105, SEQ ID NO: 107, SEQ ID NO: 109, SEQ ID NO: 111, SEQ ID NO: 113, SEQ ID NO: 115, SEQ ID NO: 117, SEQ ID NO: 119, SEQ ID NO: 121, SEQ ID NO: 123, SEQ ID NO: 125, SEQ ID NO: 127, SEQ ID NO: 129, SEQ ID NO: 131, SEQ ID NO: 133, SEQ ID NO: 135, SEQ ID NO: 137, SEQ ID NO: 139, SEQ ID NO: 141, SEQ ID NO: 143, SEQ ID NO: 152, SEQ ID NO: 154, SEQ ID NO: 156, SEQ ID NO: 158, SEQ ID NO: 160, SEQ ID NO: 162, SEQ ID NO: 164, SEQ ID NO: 166, SEQ ID NO: 168, SEQ ID NO: 170, SEQ ID NO: 172, SEQ ID NO: 174, SEQ ID NO: 176, SEQ ID NO: 178, SEQ ID NO: 180, SEQ ID NO: 182, SEQ ID NO: 184, SEQ ID NO: 186, SEQ ID NO: 188, SEQ ID NO: 190, SEQ ID NO: 192, SEQ ID NO: 194, SEQ ID NO: 196, SEQ ID NO: 193, SEQ ID NO: 200, SEQ ID NO: 202, SEQ ID NO: 204, SEQ ID NO: 206, SEQ ID NO: 208, SEQ ID NO: 210, SEQ ID NO: 212, SEQ ID NO: 214, SEQ ID NO: 216, SEQ ID NO: 218, SEQ ID NO: 220, SEQ ID NO: 229, SEQ ID NO:231, SEQ ID NO:233, SEQ ID NO: 235, SEQ ID NO: 237, SEQ ID NO: 239, SEQ ID NO: 241, SEQ ID NO: 243, SEQ ID NO: 250, SEQ ID NO: 252, SEQ ID NO: 254, SEQ ID NO: 256, SEQ ID NO: 258, SEQ ID NO: 260, SEQ ID NO: 262, SEQ ID NO: 264, SEQ ID NO: 266, SEQ ID NO: 268, SEQ ID NO: 270, SEQ ID NO: 272, SEQ ID NO: 283, SEQ ID NO: 285, SEQ ID NO: 287, SEQ ID NO: 289, SEQ ID NO: 291, SEQ ID NO: 293, SEQ ID NO: 295, SEQ ID NO: 297, SEQ ID NO: 299, SEQ ID NO: 301, SEQ ID NO: 303, SEQ ID NO: 305, SEQ ID NO: 307, SEQ ID NO: 309, SEQ ID NO: 311, SEQ ID NO: 313, SEQ ID NO: 315, SEQ ID NO: 317, SEQ ID NO: 319, SEQ ID NO: 321, SEQ ID NO: 323, SEQ ID NO: 325, SEQ ID NO: 327, SEQ ID NO: 329, SEQ ID NO: 331, SEQ ID NO: 333, SEQ ID NO: 335, SEQ ID NO: 337, SEQ ID NO: 339, SEQ ID NO: 341, SEQ ID NO: 343, SEQ ID NO: 345, SEQ ID NO: 347, SEQ ID NO: 349, SEQ ID NO: 351, SEQ ID NO: 353, SEQ ID NO: 355, SEQ ID NO: 357, SEQ ID NO: 359, SEQ ID NO: 361, SEQ ID NO: 363, SEQ ID NO: 365, SEQ ID NO: 367, SEQ ID NO: 369, SEQ ID NO: 371, SEQ ID NO: 373, SEQ ID NO: 375, SEQ ID NO: 377, SEQ ID NO: 379, SEQ ID NO: 381, SEQ ID NO: 383, SEQ ID NO: 385, SEQ ID NO: 387, SEQ ID NO: 389, SEQ ID NO: 391, SEQ ID NO: 393, SEQ ID NO: 395, SEQ ID NO: 397, SEQ ID NO: 399, SEQ ID NO: 401, SEQ ID NO: 403, SEQ ID NO: 405, SEQ ID NO: 407, SEQ ID NO: 409, SEQ ID NO: 411, SEQ ID NO: 413, SEQ ID NO: 415, SEQ ID NO: 417, SEQ ID NO: 419, SEQ ID NO: 421, SEQ ID NO: 423, SEQ ID NO: 425, SEQ ID NO: 427, SEQ ID NO: 429, SEQ ID NO: 431, SEQ ID NO: 433, SEQ ID NO: 435 or SEQ ID NO: 441 by not more than 80% or 70% of the amino acids, preferably not more than 60% or 50%, more preferred not more than 40% or 30%, even more preferred not more than 20% or 10%. In one embodiment, polypeptide distinguishes form the sequence shown in SEQ ID NO: 2, SEQ ID NO: 4, SEQ ID NO: 6, SEQ ID NO: 8, SEQ ID NO: 10, SEQ ID NO: 12, SEQ ID NO: 14, SEQ ID NO: 16, SEQ ID NO: 20, SEQ ID NO: 22, SEQ ID NO: 24, SEQ ID NO: 26, SEQ ID NO: 28, SEQ ID NO. 30, SEQ ID NO: 32; SEQ ID NO: 65, SEQ ID NO: 67, SEQ ID NO: 69, SEQ ID NO: 71, SEQ ID NO: 73, SEQ ID NO: 75, SEQ ID NO: 77, SEQ ID NO: 79, SEQ ID NO: 81, SEQ ID NO: 83, SEQ ID NO: 85, SEQ ID NO: 87, SEQ ID NO: 89, SEQ ID NO: 91, SEQ ID NO: 93, SEQ ID NO: 95, SEQ ID NO: 97, SEQ ID NO: 99, SEQ ID NO: 101, SEQ ID NO: 103, SEQ ID NO: 105, SEQ ID NO: 107, SEQ ID NO: 109, SEQ ID NO: 111, SEQ ID NO: 113, SEQ ID NO: 115, SEQ ID NO: 117, SEQ ID NO: 119, SEQ ID NO: 121, SEQ ID NO: 123, SEQ ID NO: 125, SEQ ID NO: 127, SEQ ID NO: 129, SEQ ID NO: 131, SEQ ID NO: 133, SEQ ID NO: 135, SEQ ID NO: 137, SEQ ID NO: 139, SEQ ID NO: 141, SEQ ID NO: 143, SEQ ID NO: 152, SEQ ID NO: 154, SEQ ID NO: 156, SEQ ID NO: 158, SEQ ID NO: 160, SEQ ID NO: 162, SEQ ID NO: 164, SEQ ID NO: 166, SEQ ID NO: 168, SEQ ID NO: 170, SEQ ID NO: 172, SEQ ID NO: 174, SEQ ID NO: 176, SEQ ID NO: 178, SEQ ID NO: 180, SEQ ID NO: 182, SEQ ID NO: 184, SEQ ID NO: 186, SEQ ID NO: 188, SEQ ID NO: 190, SEQ ID NO: 192, SEQ ID NO: 194, SEQ ID NO: 196, SEQ ID NO: 198, SEQ ID NO: 200, SEQ ID NO: 202, SEQ ID NO: 204, SEQ ID NO: 206, SEQ ID NO: 208, SEQ ID NO: 210, SEQ ID NO: 212, SEQ ID NO: 214, SEQ ID NO: 216, SEQ ID NO: 218, SEQ ID NO: 220, SEQ ID NO: 229, SEQ ID NO:231, SEQ ID NO:233, SEQ ID NO: 235, SEQ ID NO: 237, SEQ ID NO: 239, SEQ ID NO: 241, SEQ ID NO: 243, SEQ ID NO: 250, SEQ ID NO: 252, SEQ ID NO: 254, SEQ ID NO: 256, SEQ ID NO: 258, SEQ ID NO: 260, SEQ ID NO: 262, SEQ ID NO: 264, SEQ ID NO: 266, SEQ ID NO: 268, SEQ ID NO: 270, SEQ ID NO: 272, SEQ ID NO: 283, SEQ ID NO: 285, SEQ ID NO: 287, SEQ ID NO: 289, SEQ ID NO: 291, SEQ ID NO: 293, SEQ ID NO: 295, SEQ ID NO: 297, SEQ ID NO: 299, SEQ ID NO: 301, SEQ ID NO: 303, SEQ ID NO: 305, SEQ ID NO: 307, SEQ ID NO: 309, SEQ ID NO: 311, SEQ ID NO: 313, SEQ ID NO: 315, SEQ ID NO: 317, SEQ ID NO: 319, SEQ ID NO: 321, SEQ ID NO: 323, SEQ ID NO: 325, SEQ ID NO: 327, SEQ ID NO: 329, SEQ ID NO: 331, SEQ ID NO: 333, SEQ ID NO: 335, SEQ ID NO: 337, SEQ ID NO: 339, SEQ ID NO: 341, SEQ ID NO: 343, SEQ ID NO: 345, SEQ ID NO: 347, SEQ ID NO: 349, SEQ ID NO: 351, SEQ ID NO: 353, SEQ ID NO: 355, SEQ ID NO: 357, SEQ ID NO: 359, SEQ ID NO: 361, SEQ ID NO: 363, SEQ ID NO: 365, SEQ ID NO: 367, SEQ ID NO: 369, SEQ ID NO: 371, SEQ ID NO: 373, SEQ ID NO: 375, SEQ ID NO: 377, SEQ ID NO: 379, SEQ ID NO: 381, SEQ ID NO: 383, SEQ ID NO: 385, SEQ ID NO: 387, SEQ ID NO: 389, SEQ ID NO: 391, SEQ ID NO: 393, SEQ ID NO: 395, SEQ ID NO: 397, SEQ ID NO: 399, SEQ ID NO: 401, SEQ ID NO: 403, SEQ ID NO: 405, SEQ ID NO: 407, SEQ ID NO: 409, SEQ ID NO: 411, SEQ ID NO: 413, SEQ ID NO: 415, SEQ ID NO: 417, SEQ ID NO: 419, SEQ ID NO: 421, SEQ ID NO: 423, SEQ ID NO: 425, SEQ ID NO: 427, SEQ ID NO: 429, SEQ ID NO: 431, SEQ ID NO: 433, SEQ ID NO: 435 or SEQ ID NO: 441 by more than 5, 6, 7, 8 or 9 amino acids, preferably by more than 10, 15, 20, 25 or 30 amino acids, even more preferred are more than 40, 50, or 60 amino acids. In another embodiment, said polypeptide of the invention does not consist of the sequence shown in SEQ ID NO: 2, SEQ ID NO: 4, SEQ ID NO: 6, SEQ ID NO: 8, SEQ ID NO: 10, SEQ ID NO: 12, SEQ ID NO: 14, SEQ ID NO: 16, SEQ ID NO: 20, SEQ ID NO: 22, SEQ ID NO: 24, SEQ ID NO: 26, SEQ ID NO: 28, SEQ ID NO. 30, SEQ ID NO: 32; SEQ ID NO: 65, SEQ ID NO: 67, SEQ ID NO: 69, SEQ ID NO: 71, SEQ ID NO: 73, SEQ ID NO: 75, SEQ ID NO: 77, SEQ ID NO: 79, SEQ ID NO: 81, SEQ ID NO: 83, SEQ ID NO: 85, SEQ ID NO: 87, SEQ ID NO: 89, SEQ ID NO: 91, SEQ ID NO: 93, SEQ ID NO: 95, SEQ ID NO: 97, SEQ ID NO: 99, SEQ ID NO: 101, SEQ ID NO: 103, SEQ ID NO: 105, SEQ ID NO: 107, SEQ ID NO: 109, SEQ ID NO: 111, SEQ ID NO: 113, SEQ ID NO: 115, SEQ ID NO: 117, SEQ ID NO: 119, SEQ ID NO: 121, SEQ ID NO: 123, SEQ ID NO: 125, SEQ ID NO: 127, SEQ ID NO: 129, SEQ ID NO: 131, SEQ ID NO: 133, SEQ ID NO: 135, SEQ ID NO: 137, SEQ ID NO: 139, SEQ ID NO: 141, SEQ ID NO: 143, SEQ ID NO: 152, SEQ ID NO: 154, SEQ ID NO: 156, SEQ ID NO: 158, SEQ ID NO: 160, SEQ ID NO: 162, SEQ ID NO: 164, SEQ ID NO: 166, SEQ ID NO: 168, SEQ ID NO: 170, SEQ ID NO: 172, SEQ ID NO: 174, SEQ ID NO: 176, SEQ ID NO: 178, SEQ ID NO: 180, SEQ ID NO: 182, SEQ ID NO: 184, SEQ ID NO: 186, SEQ ID NO: 188, SEQ ID NO: 190, SEQ ID NO: 192, SEQ ID NO: 194, SEQ ID NO: 196, SEQ ID NO: 198, SEQ ID NO: 200, SEQ ID NO: 202, SEQ ID NO: 204, SEQ ID NO: 206, SEQ ID NO: 208, SEQ ID NO: 210, SEQ ID NO: 212, SEQ ID NO: 214, SEQ ID NO: 216, SEQ ID NO: 218, SEQ ID NO: 220, SEQ ID NO: 229, SEQ ID NO:231, SEQ ID NO:233, SEQ ID NO: 235, SEQ ID NO: 237, SEQ ID NO: 239, SEQ ID NO: 241, SEQ ID NO: 243, SEQ ID NO: 250, SEQ ID NO: 252, SEQ ID NO: 254, SEQ ID NO: 256, SEQ ID NO: 258, SEQ ID NO: 260, SEQ ID NO: 262, SEQ ID NO: 264, SEQ ID NO: 266, SEQ ID NO: 268, SEQ ID NO: 270, SEQ ID NO: 272, SEQ ID NO: 283, SEQ ID NO: 285, SEQ ID NO: 287, SEQ ID NO: 289, SEQ ID NO: 291, SEQ ID NO: 293, SEQ ID NO: 295, SEQ ID NO: 297, SEQ ID NO: 299, SEQ ID NO: 301, SEQ ID NO: 303, SEQ ID NO: 305, SEQ ID NO: 307, SEQ ID NO: 309, SEQ ID NO: 311, SEQ ID NO: 313, SEQ ID NO: 315, SEQ ID NO: 317, SEQ ID NO: 319, SEQ ID NO: 321, SEQ ID NO: 323, SEQ ID NO: 325, SEQ ID NO: 327, SEQ ID NO: 329, SEQ ID NO: 331, SEQ ID NO: 333, SEQ ID NO: 335, SEQ ID NO: 337, SEQ ID NO: 339, SEQ ID NO: 341, SEQ ID NO: 343, SEQ ID NO: 345, SEQ ID NO: 347, SEQ ID NO: 349, SEQ ID NO: 351, SEQ ID NO: 353, SEQ ID NO: 355, SEQ ID NO: 357, SEQ ID NO: 359, SEQ ID NO: 361, SEQ ID NO: 363, SEQ ID NO: 365, SEQ ID NO: 367, SEQ ID NO: 369, SEQ ID NO: 371, SEQ ID NO: 373, SEQ ID NO: 375, SEQ ID NO: 377, SEQ ID NO: 379, SEQ ID NO: 381, SEQ ID NO: 383, SEQ ID NO: 385, SEQ ID NO: 387, SEQ ID NO: 389, SEQ ID NO: 391, SEQ ID NO: 393, SEQ ID NO: 395, SEQ ID NO: 397, SEQ ID NO: 399, SEQ ID NO: 401, SEQ ID NO: 403, SEQ ID NO: 405, SEQ ID NO: 407, SEQ ID NO: 409, SEQ ID NO: 411, SEQ ID NO: 413, SEQ ID NO: 415, SEQ ID NO: 417, SEQ ID NO: 419, SEQ ID NO: 421, SEQ ID NO: 423, SEQ ID NO: 425, SEQ ID NO: 427, SEQ ID NO: 429, SEQ ID NO: 431, SEQ ID NO: 433, SEQ ID NO: 435 or SEQ ID NO: 441. In a further embodiment, said polypeptide of the present invention is less than 100%, 99.999%, 99.99%, 99.9% or 99% identical. In one embodiment, the polypeptide of the invention originates from an non-plant cell, in particular from a microorganism, and was expressed in a plant cell.

[0435] The terms “protein” and “polypeptide” used in this application are interchangeable. “Polypeptide” refers to a polymer of amino acids (amino acid sequence) and does not refer to a specific length of the molecule. Thus peptides and oligopeptides are included within the definition of polypeptide. This term does also refer to or include post-translational modifications of the polypeptide, for example, glycosylations, acetylations, phosphorylations and the like. Included within the definition are, for example, polypeptides containing one or more analogs of an amino acid (including, for example, unnatural amino acids, etc.), polypeptides with substituted linkages, as well as other modifications known in the art, both naturally occurring and non-naturally occurring.

[0436] Preferably, the polypeptide is isolated. An “isolated” or “purified” protein or nucleic acid molecule or biologically active portion thereof is substantially free of cellular material when produced by recombinant DNA techniques, or chemical precursors or other chemicals when chemically synthesized.

[0437] The language “substantially free of cellular material” includes preparations of the polypeptide of the invention in which the protein is separated from cellular components of the cells in which it is naturally or recombinantly produced. In one embodiment, the language “substantially free of cellular material” includes preparations having less than about 30% (by dry weight) of “contaminating protein”, more preferably less than about 20% of “contaminating protein”, still more preferably less than about 10% of “contaminating protein”, and most preferably less than about 5% “contaminating protein”. The term “contaminating protein” relates to polypeptides, which are not polypeptides of the present invention. When the polypeptide of the present invention or biologically active portion thereof is recombinantly produced, it is also preferably substantially free of culture medium, i.e., culture medium represents less than about 20%, more preferably less than about 10%, and most preferably less than about 5% of the volume of the protein preparation. The language “substantially free of chemical precursors or other chemicals” includes preparations in which the polypeptide of the present invention is separated from chemical precursors or other chemicals, which are involved in the synthesis of the protein. The language “substantially free of chemical precursors or other chemicals” includes preparations having less than about 30% (by dry weight) of chemical precursors or other proteins or chemicals which are not identical to the protein of the invention, more preferably less than about 20% chemical precursors or other proteins or chemicals, still more preferably less than about 10% chemical precursors or other proteins or chemicals, and most preferably less than about 5% chemical precursors or other proteins or chemicals which are not identical to the protein of the invention. In preferred embodiments, isolated proteins or biologically active portions thereof lack contaminating proteins from the same organism from which the polypeptide of the present invention is derived. Typically, such proteins are produced by recombinant techniques.

[0438] A polypeptide of the invention can participate in the process of the present invention. The polypeptide or a portion thereof comprises preferably an amino acid sequence which is sufficiently homologous to an amino acid sequence shown in SEQ ID NO: 2, SEQ ID NO: 4, SEQ ID NO: 6, SEQ ID NO: 8, SEQ ID NO: 10, SEQ ID NO: 12, SEQ ID NO: 14, SEQ ID NO: 16, SEQ ID NO: 20, SEQ ID NO: 22, SEQ ID NO: 24, SEQ ID NO: 26, SEQ ID NO: 28, SEQ ID NO. 30, SEQ ID NO: 32; SEQ ID NO: 65, SEQ ID NO: 67, SEQ ID NO: 69, SEQ ID NO: 71, SEQ ID NO: 73, SEQ ID NO: 75, SEQ ID NO: 77, SEQ ID NO: 79, SEQ ID NO: 81, SEQ ID NO: 83, SEQ ID NO: 85, SEQ ID NO: 87, SEQ ID NO: 89, SEQ ID NO: 91, SEQ ID NO: 93, SEQ ID NO: 95, SEQ ID NO: 97, SEQ ID NO: 99, SEQ ID NO: 101, SEQ ID NO: 103, SEQ ID NO: 105, SEQ ID NO: 107, SEQ ID NO: 109, SEQ ID NO: 111, SEQ ID NO: 113, SEQ ID NO: 115, SEQ ID NO: 117, SEQ ID NO: 119, SEQ ID NO: 121, SEQ ID NO: 123, SEQ ID NO: 125, SEQ ID NO: 127, SEQ ID NO: 129, SEQ ID NO: 131, SEQ ID NO: 133, SEQ ID NO: 135, SEQ ID NO: 137, SEQ ID NO: 139, SEQ ID NO: 141, SEQ ID NO: 143, SEQ ID NO: 152, SEQ ID NO: 154, SEQ ID NO: 156, SEQ ID NO: 158, SEQ ID NO: 160, SEQ ID NO: 162, SEQ ID NO: 164, SEQ ID NO: 166, SEQ ID NO: 168, SEQ ID NO: 170, SEQ ID NO: 172, SEQ ID NO: 174, SEQ ID NO: 176, SEQ ID NO: 178, SEQ ID NO: 180, SEQ ID NO: 182, SEQ ID NO: 184, SEQ ID NO: 186, SEQ ID NO: 188, SEQ ID NO: 190, SEQ ID NO: 192, SEQ ID NO: 194, SEQ ID NO: 196, SEQ ID NO: 198, SEQ ID NO: 200, SEQ ID NO: 202, SEQ ID NO: 204, SEQ ID NO: 206, SEQ ID NO: 208, SEQ ID NO: 210, SEQ ID NO: 212, SEQ ID NO: 214, SEQ ID NO: 216, SEQ ID NO: 218, SEQ ID NO: 220, SEQ ID NO: 229, SEQ ID NO:231, SEQ ID NO:233, SEQ ID NO: 235, SEQ ID NO: 237, SEQ ID NO: 239, SEQ ID NO: 241, SEQ ID NO: 243, SEQ ID NO: 250, SEQ ID NO: 252, SEQ ID NO: 254, SEQ ID NO: 256, SEQ ID NO: 258, SEQ ID NO: 260, SEQ ID NO: 262, SEQ ID NO: 264, SEQ ID NO: 266, SEQ ID NO: 268, SEQ ID NO: 270, SEQ ID NO: 272, SEQ ID NO: 283, SEQ ID NO: 285, SEQ ID NO: 287, SEQ ID NO: 289, SEQ ID NO: 291, SEQ ID NO: 293, SEQ ID NO: 295, SEQ ID NO: 297, SEQ ID NO: 299, SEQ ID NO: 301, SEQ ID NO: 303, SEQ ID NO: 305, SEQ ID NO: 307, SEQ ID NO: 309, SEQ ID NO: 311, SEQ ID NO: 313, SEQ ID NO: 315, SEQ ID NO: 317, SEQ ID NO: 319, SEQ ID NO: 321, SEQ ID NO: 323, SEQ ID NO: 325, SEQ ID NO: 327, SEQ ID NO: 329, SEQ ID NO: 331, SEQ ID NO: 333, SEQ ID NO: 335, SEQ ID NO: 337, SEQ ID NO: 339, SEQ ID NO: 341, SEQ ID NO: 343, SEQ ID NO: 345, SEQ ID NO: 347, SEQ ID NO: 349, SEQ ID NO: 351, SEQ ID NO: 353, SEQ ID NO: 355, SEQ ID NO: 357, SEQ ID NO: 359, SEQ ID NO: 361, SEQ ID NO: 363, SEQ ID NO: 365, SEQ ID NO: 367, SEQ ID NO: 369, SEQ ID NO: 371, SEQ ID NO: 373, SEQ ID NO: 375, SEQ ID NO: 377, SEQ ID NO: 379, SEQ ID NO: 381, SEQ ID NO: 383, SEQ ID NO: 385, SEQ ID NO: 387, SEQ ID NO: 389, SEQ ID NO: 391, SEQ ID NO: 393, SEQ ID NO: 395, SEQ ID NO: 397, SEQ ID NO: 399, SEQ ID NO: 401, SEQ ID NO: 403, SEQ ID NO: 405, SEQ ID NO: 407, SEQ ID NO: 409, SEQ ID NO: 411, SEQ ID NO: 413, SEQ ID NO: 415, SEQ ID NO: 417, SEQ ID NO: 419, SEQ ID NO: 421, SEQ ID NO: 423, SEQ ID NO: 425, SEQ ID NO: 427, SEQ ID NO: 429, SEQ ID NO: 431, SEQ ID NO: 433, SEQ ID NO: 435 or SEQ ID NO: 441 such that the protein or portion thereof maintains the ability to confer the activity of the present invention, that means an increase of the fine chemical content in the organism by decreasing its biological activity. Preferably, the polypeptide used in the inventive process has an amino acid sequence identical as shown in SEQ ID NO: 2, SEQ ID NO: 4, SEQ ID NO: 6, SEQ ID NO: 8, SEQ ID NO: 10, SEQ ID NO: 12, SEQ ID NO: 14, SEQ ID NO: 16, SEQ ID NO: 20, SEQ ID NO: 22, SEQ ID NO: 24, SEQ ID NO: 26, SEQ ID NO: 28, SEQ ID NO. 30, SEQ ID NO: 32; SEQ ID NO: 65, SEQ ID NO: 67, SEQ ID NO: 69, SEQ ID NO: 71, SEQ ID NO: 73, SEQ ID NO: 75, SEQ ID NO: 77, SEQ ID NO: 79, SEQ ID NO: 81, SEQ ID NO: 83, SEQ ID NO: 85, SEQ ID NO: 87, SEQ ID NO: 89, SEQ ID NO: 91, SEQ ID NO: 93, SEQ ID NO: 95, SEQ ID NO: 97, SEQ ID NO: 99, SEQ ID NO: 101, SEQ ID NO: 103, SEQ ID NO: 105, SEQ ID NO: 107, SEQ ID NO: 109, SEQ ID NO: 111, SEQ ID NO: 113, SEQ ID NO: 115, SEQ ID NO: 117, SEQ ID NO: 119, SEQ ID NO: 121, SEQ ID NO: 123, SEQ ID NO: 125, SEQ ID NO: 127, SEQ ID NO: 129, SEQ ID NO: 131, SEQ ID NO: 133, SEQ ID NO: 135, SEQ ID NO: 137, SEQ ID NO: 139, SEQ ID NO: 141, SEQ ID NO: 143, SEQ ID NO: 152, SEQ ID NO: 154, SEQ ID NO: 156, SEQ ID NO: 158, SEQ ID NO: 160, SEQ ID NO: 162, SEQ ID NO: 164, SEQ ID NO: 166, SEQ ID NO: 168, SEQ ID NO: 170, SEQ ID NO: 172, SEQ ID NO: 174, SEQ ID NO: 176, SEQ ID NO: 178, SEQ ID NO: 180, SEQ ID NO: 182, SEQ ID NO: 184, SEQ ID NO: 186, SEQ ID NO: 188, SEQ ID NO: 190, SEQ ID NO: 192, SEQ ID NO: 194, SEQ ID NO: 196, SEQ ID NO: 198, SEQ ID NO: 200, SEQ ID NO: 202, SEQ ID NO: 204, SEQ ID NO: 206, SEQ ID NO: 208, SEQ ID NO: 210, SEQ ID NO: 212, SEQ ID NO: 214, SEQ ID NO: 216, SEQ ID NO: 218, SEQ ID NO: 220, SEQ ID NO: 229, SEQ ID NO:231, SEQ ID NO:233, SEQ ID NO: 235, SEQ ID NO: 237, SEQ ID NO: 239, SEQ ID NO: 241, SEQ ID NO: 243, SEQ ID NO: 250, SEQ ID NO: 252, SEQ ID NO: 254, SEQ ID NO: 256, SEQ ID NO: 258, SEQ ID NO: 260, SEQ ID NO: 262, SEQ ID NO: 264, SEQ ID NO: 266, SEQ ID NO: 268, SEQ ID NO: 270, SEQ ID NO: 272, SEQ ID NO: 283, SEQ ID NO: 285, SEQ ID NO: 287, SEQ ID NO: 289, SEQ ID NO: 291, SEQ ID NO: 293, SEQ ID NO: 295, SEQ ID NO: 297, SEQ ID NO: 299, SEQ ID NO: 301, SEQ ID NO: 303, SEQ ID NO: 305, SEQ ID NO: 307, SEQ ID NO: 309, SEQ ID NO: 311, SEQ ID NO: 313, SEQ ID NO: 315, SEQ ID NO: 317, SEQ ID NO: 319, SEQ ID NO: 321, SEQ ID NO: 323, SEQ ID NO: 325, SEQ ID NO: 327, SEQ ID NO: 329, SEQ ID NO: 331, SEQ ID NO: 333, SEQ ID NO: 335, SEQ ID NO: 337, SEQ ID NO: 339, SEQ ID NO: 341, SEQ ID NO: 343, SEQ ID NO: 345, SEQ ID NO: 347, SEQ ID NO: 349, SEQ ID NO: 351, SEQ ID NO: 353, SEQ ID NO: 355, SEQ ID NO: 357, SEQ ID NO: 359, SEQ ID NO: 361, SEQ ID NO: 363, SEQ ID NO: 365, SEQ ID NO: 367, SEQ ID NO: 369, SEQ ID NO: 371, SEQ ID NO: 373, SEQ ID NO: 375, SEQ ID NO: 377, SEQ ID NO: 379, SEQ ID NO: 381, SEQ ID NO: 383, SEQ ID NO: 385, SEQ ID NO: 387, SEQ ID NO: 389, SEQ ID NO: 391, SEQ ID NO: 393, SEQ ID NO: 395, SEQ ID NO: 397, SEQ ID NO: 399, SEQ ID NO: 401, SEQ ID NO: 403, SEQ ID NO: 405, SEQ ID NO: 407, SEQ ID NO: 409, SEQ ID NO: 411, SEQ ID NO: 413, SEQ ID NO: 415, SEQ ID NO: 417, SEQ ID NO: 419, SEQ ID NO: 421, SEQ ID NO: 423, SEQ ID NO: 425, SEQ ID NO: 427, SEQ ID NO: 429, SEQ ID NO: 431, SEQ ID NO: 433, SEQ ID NO: 435 or SEQ ID NO: 441.

[0439] Further, the polypeptide can have an amino acid sequence which is encoded by a nucleotide sequence which hybridizes, preferably hybridizes under stringent conditions as described above, to a nucleotide sequence of the nucleic acid molecule of the present invention. Accordingly, the polypeptide has an amino acid sequence which is encoded by a nucleotide sequence that is at least about 35%, 40%, 45%, 50%, 55%, 60%, 65% or 70%, preferably at least about 75%, 80%, 85% or 90%, and more preferably at least about 91%, 92%, 93%, 94% or 95%, and even more preferably at least about 96%, 97%, 98%, 99% or more homologous to one of the amino acid sequences of SEQ ID NO: 2, SEQ ID NO: 4, SEQ ID NO: 6, SEQ ID NO: 8, SEQ ID NO: 10, SEQ ID NO: 12, SEQ ID NO: 14, SEQ ID NO: 16, SEQ ID NO: 20, SEQ ID NO: 22, SEQ ID NO: 24, SEQ ID NO: 26, SEQ ID NO: 28, SEQ ID NO. 30, SEQ ID NO: 32; SEQ ID NO: 65, SEQ ID NO: 67, SEQ ID NO: 69, SEQ ID NO: 71, SEQ ID NO: 73, SEQ ID NO: 75, SEQ ID NO: 77, SEQ ID NO: 79, SEQ ID NO: 81, SEQ ID NO: 83, SEQ ID NO: 85, SEQ ID NO: 87, SEQ ID NO: 89, SEQ ID NO: 91, SEQ ID NO: 93, SEQ ID NO: 95, SEQ ID NO: 97, SEQ ID NO: 99, SEQ ID NO: 101, SEQ ID NO: 103, SEQ ID NO: 105, SEQ ID NO: 107, SEQ ID NO: 109, SEQ ID NO: 111, SEQ ID NO: 113, SEQ ID NO: 115, SEQ ID NO: 117, SEQ ID NO: 119, SEQ ID NO: 121, SEQ ID NO: 123, SEQ ID NO: 125, SEQ ID NO: 127, SEQ ID NO: 129, SEQ ID NO: 131, SEQ ID NO: 133, SEQ ID NO: 135, SEQ ID NO: 137, SEQ ID NO: 139, SEQ ID NO: 141, SEQ ID NO: 143, SEQ ID NO: 152, SEQ ID NO: 154, SEQ ID NO: 156, SEQ ID NO: 158, SEQ ID NO: 160, SEQ ID NO: 162, SEQ ID NO: 164, SEQ ID NO: 166, SEQ ID NO: 168, SEQ ID NO: 170, SEQ ID NO: 172, SEQ ID NO: 174, SEQ ID NO: 176, SEQ ID NO: 178, SEQ ID NO: 180, SEQ ID NO: 182, SEQ ID NO: 184, SEQ ID NO: 186, SEQ ID NO: 188, SEQ ID NO: 190, SEQ ID NO: 192, SEQ ID NO: 194, SEQ ID NO: 196, SEQ ID NO: 198, SEQ ID NO: 200, SEQ ID NO: 202, SEQ ID NO: 204, SEQ ID NO: 206, SEQ ID NO: 208, SEQ ID NO: 210, SEQ ID NO: 212, SEQ ID NO: 214, SEQ ID NO: 216, SEQ ID NO: 218, SEQ ID NO: 220, SEQ ID NO: 229, SEQ ID NO:231, SEQ ID NO:233, SEQ ID NO: 235, SEQ ID NO: 237, SEQ ID NO: 239, SEQ ID NO: 241, SEQ ID NO: 243, SEQ ID NO: 250, SEQ ID NO: 252, SEQ ID NO: 254, SEQ ID NO: 256, SEQ ID NO: 258, SEQ ID NO: 260, SEQ ID NO: 262, SEQ ID NO: 264, SEQ ID NO: 266, SEQ ID NO: 268, SEQ ID NO: 270, SEQ ID NO: 272, SEQ ID NO: 283, SEQ ID NO: 285, SEQ ID NO: 287, SEQ ID NO: 289, SEQ ID NO: 291, SEQ ID NO: 293, SEQ ID NO: 295, SEQ ID NO: 297, SEQ ID NO: 299, SEQ ID NO: 301, SEQ ID NO: 303, SEQ ID NO: 305, SEQ ID NO: 307, SEQ ID NO: 309, SEQ ID NO: 311, SEQ ID NO: 313, SEQ ID NO: 315, SEQ ID NO: 317, SEQ ID NO: 319, SEQ ID NO: 321, SEQ ID NO: 323, SEQ ID NO: 325, SEQ ID NO: 327, SEQ ID NO: 329, SEQ ID NO: 331, SEQ ID NO: 333, SEQ ID NO: 335, SEQ ID NO: 337, SEQ ID NO: 339, SEQ ID NO: 341, SEQ ID NO: 343, SEQ ID NO: 345, SEQ ID NO: 347, SEQ ID NO: 349, SEQ ID NO: 351, SEQ ID NO: 353, SEQ ID NO: 355, SEQ ID NO: 357, SEQ ID NO: 359, SEQ ID NO: 361, SEQ ID NO: 363, SEQ ID NO: 365, SEQ ID NO: 367, SEQ ID NO: 369, SEQ ID NO: 371, SEQ ID NO: 373, SEQ ID NO: 375, SEQ ID NO: 377, SEQ ID NO: 379, SEQ ID NO: 381, SEQ ID NO: 383, SEQ ID NO: 385, SEQ ID NO: 387, SEQ ID NO: 389, SEQ ID NO: 391, SEQ ID NO: 393, SEQ ID NO: 395, SEQ ID NO: 397, SEQ ID NO: 399, SEQ ID NO: 401, SEQ ID NO: 403, SEQ ID NO: 405, SEQ ID NO: 407, SEQ ID NO: 409, SEQ ID NO: 411, SEQ ID NO: 413, SEQ ID NO: 415, SEQ ID NO: 417, SEQ ID NO: 419, SEQ ID NO: 421, SEQ ID NO: 423, SEQ ID NO: 425, SEQ ID NO: 427, SEQ ID NO: 429, SEQ ID NO: 431, SEQ ID NO: 433, SEQ ID NO: 435 or SEQ ID NO: 441. The preferred polypeptide of the present invention preferably possesses at least one of the activities according to the invention and described herein. A preferred polypeptide of the present invention includes an amino acid sequence encoded by a nucleotide sequence which hybridizes, preferably hybridizes under stringent conditions, to a nucleotide sequence of SEQ ID NO: 1, SEQ ID NO: 3, SEQ ID NO: 5, SEQ ID NO: 7, SEQ ID NO: 9, SEQ ID NO: 11, SEQ ID NO: 13, SEQ ID NO: 15, SEQ ID NO: 19, SEQ ID NO: 21, SEQ ID NO: 23, SEQ ID NO: 25, SEQ ID NO: 27, SEQ ID NO: 29, SEQ ID NO: 31; SEQ ID NO: 64, SEQ ID NO: 66, SEQ ID NO: 68, SEQ ID NO: 70, SEQ ID NO: 72, SEQ ID NO: 74, SEQ ID NO: 76, SEQ ID NO: 78, SEQ ID NO: 80, SEQ ID NO: 82, SEQ ID NO: 84, SEQ ID NO: 86, SEQ ID NO: 88, SEQ ID NO: 90, SEQ ID NO: 92, SEQ ID NO: 94, SEQ ID NO: 96, SEQ ID NO: 98, SEQ ID NO: 100, SEQ ID NO: 102, SEQ ID NO: 104, SEQ ID NO: 106, SEQ ID NO: 108, SEQ ID NO: 110, SEQ ID NO: 112, SEQ ID NO: 114, SEQ ID NO: 116, SEQ ID NO: 118, SEQ ID NO: 120, SEQ ID NO: 122, SEQ ID NO: 124, SEQ ID NO: 126, SEQ ID NO: 128, SEQ ID NO: 130, SEQ ID NO: 132, SEQ ID NO: 134, SEQ ID NO: 136, SEQ ID NO: 138, SEQ ID NO: 140, SEQ ID NO: , SEQ ID NO: 142, SEQ ID NO: 151, SEQ ID NO: 153, SEQ ID NO: 155, SEQ ID NO: 157, SEQ ID NO: 159, SEQ ID NO: 161, SEQ ID NO: 163, SEQ ID NO: 165, SEQ ID NO: 167, SEQ ID NO: 169, SEQ ID NO: 171, SEQ ID NO: 173, SEQ ID NO: 175, SEQ ID NO: 177, SEQ ID NO: 179, SEQ ID NO: 181, SEQ ID NO: 183, SEQ ID NO: 185, SEQ ID NO: 187, SEQ ID NO: 189, SEQ ID NO: 191, SEQ ID NO: 193, SEQ ID NO: 195, SEQ ID NO: 197, SEQ ID NO: 199, SEQ ID NO: 201, SEQ ID NO: 203, SEQ ID NO: 205, SEQ ID NO: 207, SEQ ID NO: 209, SEQ ID NO: 211, SEQ ID NO: 213, SEQ ID NO: 215, SEQ ID NO: 217, SEQ ID NO: 219, SEQ ID NO: 228, SEQ ID NO: 230, SEQ ID NO: 232, SEQ ID NO: 234, SEQ ID NO: 236, SEQ ID NO: 238, SEQ ID NO: 240, SEQ ID NO: 242, SEQ ID NO: 249, SEQ ID NO: 251, SEQ ID NO: 253, SEQ ID NO: 255, SEQ ID NO: 257, SEQ ID NO: 259, SEQ ID NO: 261, SEQ ID NO: 263, SEQ ID NO: 265, SEQ ID NO: 267, SEQ ID NO: 269, SEQ ID NO: 271, SEQ ID NO: 282, SEQ ID NO: 284, SEQ ID NO: 286, SEQ ID NO: 288, SEQ ID NO: 290, SEQ ID NO: 292, SEQ ID NO: 294, SEQ ID NO: 296, SEQ ID NO: 298, SEQ ID NO: 300, SEQ ID NO: 302, SEQ ID NO: 304, SEQ ID NO: 306, SEQ ID NO: 308, SEQ ID NO: 310, SEQ ID NO: 312, SEQ ID NO: 314, SEQ ID NO: 316, SEQ ID NO: 318, SEQ ID NO: 320, SEQ ID NO: 322, SEQ ID NO: 324, SEQ ID NO: 326, SEQ ID NO: 328, SEQ ID NO: 330, SEQ ID NO: 332, SEQ ID NO: 334, SEQ ID NO: 336, SEQ ID NO: 338, SEQ ID NO: 340, SEQ ID NO: 342, SEQ ID NO: 344, SEQ ID NO: 346, SEQ ID NO: 348, SEQ ID NO: 350, SEQ ID NO: 352, SEQ ID NO: 354, SEQ ID NO: 356, SEQ ID NO: 358, SEQ ID NO: 360, SEQ ID NO: 362, SEQ ID NO: 364, SEQ ID NO: 366, SEQ ID NO: 368, SEQ ID NO: 370, SEQ ID NO: 372, SEQ ID NO: 374, SEQ ID NO: 376, SEQ ID NO: 378, SEQ ID NO: 380, SEQ ID NO: 382, SEQ ID NO: 384, SEQ ID NO: 386, SEQ ID NO: 388, SEQ ID NO: 390, SEQ ID NO: 392, SEQ ID NO: 394, SEQ ID NO: 396, SEQ ID NO: 398, SEQ ID NO: 400, SEQ ID NO: 402, SEQ ID NO: 404, SEQ ID NO: 406, SEQ ID NO: 408, SEQ ID NO: 410, SEQ ID NO: 412, SEQ ID NO: 414, SEQ ID NO: 416, SEQ ID NO: 418, SEQ ID NO: 420, SEQ ID NO: 422, SEQ ID NO: 424, SEQ ID NO: 426, SEQ ID NO: 428, SEQ ID NO: 430, SEQ ID NO: 432, SEQ ID NO: 434 or SEQ ID NO: 440 or which is homologous thereto, as defined above.

[0440] Accordingly the polypeptide of the present invention can vary from SEQ ID NO: 2, SEQ ID NO: 4, SEQ ID NO: 6, SEQ ID NO: 8, SEQ ID NO: 10, SEQ ID NO: 12, SEQ ID NO: 14, SEQ ID NO: 16, SEQ ID NO: 20, SEQ ID NO: 22, SEQ ID NO: 24, SEQ ID NO: 26, SEQ ID NO: 28, SEQ ID NO. 30, SEQ ID NO: 32; SEQ ID NO: 65, SEQ ID NO: 67, SEQ ID NO: 69, SEQ ID NO: 71, SEQ ID NO: 73, SEQ ID NO: 75, SEQ ID NO: 77, SEQ ID NO: 79, SEQ ID NO: 81, SEQ ID NO: 83, SEQ ID NO: 85, SEQ ID NO: 87, SEQ ID NO: 89, SEQ ID NO: 91, SEQ ID NO: 93, SEQ ID NO: 95, SEQ ID NO: 97, SEQ ID NO: 99, SEQ ID NO: 101, SEQ ID NO: 103, SEQ ID NO: 105, SEQ ID NO: 107, SEQ ID NO: 109, SEQ ID NO: 111, SEQ ID NO: 113, SEQ ID NO: 115, SEQ ID NO: 117, SEQ ID NO: 119, SEQ ID NO: 121, SEQ ID NO: 123, SEQ ID NO: 125, SEQ ID NO: 127, SEQ ID NO: 129, SEQ ID NO: 131, SEQ ID NO: 133, SEQ ID NO: 135, SEQ ID NO: 137, SEQ ID NO: 139, SEQ ID NO: 141, SEQ ID NO: 143, SEQ ID NO: 152, SEQ ID NO: 154, SEQ ID NO: 156, SEQ ID NO: 158, SEQ ID NO: 160, SEQ ID NO: 162, SEQ ID NO: 164, SEQ ID NO: 166, SEQ ID NO: 168, SEQ ID NO: 170, SEQ ID NO: 172, SEQ ID NO: 174, SEQ ID NO: 176, SEQ ID NO: 178, SEQ ID NO: 180, SEQ ID NO: 182, SEQ ID NO: 184, SEQ ID NO: 186, SEQ ID NO: 188, SEQ ID NO: 190, SEQ ID NO: 192, SEQ ID NO: 194, SEQ ID NO: 196, SEQ ID NO: 198, SEQ ID NO: 200, SEQ ID NO: 202, SEQ ID NO: 204, SEQ ID NO: 206, SEQ ID NO: 208, SEQ ID NO: 210, SEQ ID NO: 212, SEQ ID NO: 214, SEQ ID NO: 216, SEQ ID NO: 218, SEQ ID NO: 220, SEQ ID NO: 229, SEQ ID NO:231, SEQ ID NO:233, SEQ ID NO: 235, SEQ ID NO: 237, SEQ ID NO: 239, SEQ ID NO: 241, SEQ ID NO: 243, SEQ ID NO: 250, SEQ ID NO: 252, SEQ ID NO: 254, SEQ ID NO: 256, SEQ ID NO: 258, SEQ ID NO: 260, SEQ ID NO: 262, SEQ ID NO: 264, SEQ ID NO: 266, SEQ ID NO: 268, SEQ ID NO: 270, SEQ ID NO: 272, SEQ ID NO: 283, SEQ ID NO: 285, SEQ ID NO: 287, SEQ ID NO: 289, SEQ ID NO: 291, SEQ ID NO: 293, SEQ ID NO: 295, SEQ ID NO: 297, SEQ ID NO: 299, SEQ ID NO: 301, SEQ ID NO: 303, SEQ ID NO: 305, SEQ ID NO: 307, SEQ ID NO: 309, SEQ ID NO: 311, SEQ ID NO: 313, SEQ ID NO: 315, SEQ ID NO: 317, SEQ ID NO: 319, SEQ ID NO: 321, SEQ ID NO: 323, SEQ ID NO: 325, SEQ ID NO: 327, SEQ ID NO: 329, SEQ ID NO: 331, SEQ ID NO: 333, SEQ ID NO: 335, SEQ ID NO: 337, SEQ ID NO: 339, SEQ ID NO: 341, SEQ ID NO: 343, SEQ ID NO: 345, SEQ ID NO: 347, SEQ ID NO: 349, SEQ ID NO: 351, SEQ ID NO: 353, SEQ ID NO: 355, SEQ ID NO: 357, SEQ ID NO: 359, SEQ ID NO: 361, SEQ ID NO: 363, SEQ ID NO: 365, SEQ ID NO: 367, SEQ ID NO: 369, SEQ ID NO: 371, SEQ ID NO: 373, SEQ ID NO: 375, SEQ ID NO: 377, SEQ ID NO: 379, SEQ ID NO: 381, SEQ ID NO: 383, SEQ ID NO: 385, SEQ ID NO: 387, SEQ ID NO: 389, SEQ ID NO: 391, SEQ ID NO: 393, SEQ ID NO: 395, SEQ ID NO: 397, SEQ ID NO: 399, SEQ ID NO: 401, SEQ ID NO: 403, SEQ ID NO: 405, SEQ ID NO: 407, SEQ ID NO: 409, SEQ ID NO: 411, SEQ ID NO: 413, SEQ ID NO: 415, SEQ ID NO: 417, SEQ ID NO: 419, SEQ ID NO: 421, SEQ ID NO: 423, SEQ ID NO: 425, SEQ ID NO: 427, SEQ ID NO: 429, SEQ ID NO: 431, SEQ ID NO: 433, SEQ ID NO: 435 or SEQ ID NO: 441 in amino acid sequence due to natural variation or mutagenesis, as described in detail herein. Accordingly, the polypeptide comprise an amino acid sequence which is at least about 35%, 40%, 45%, 50%, 55%, 60%, 65% or 70%, preferably at least about 75%, 80%, 85% or 90, and more preferably at least about 91%, 92%, 93%, 94% or 95%, and most preferably at least about 96%, 97%, 98%, 99% or more homologous to an entire amino acid sequence of SEQ ID NO: 2, SEQ ID NO: 4, SEQ ID NO: 6, SEQ ID NO: 8, SEQ ID NO: 10, SEQ ID NO: 12, SEQ ID NO: 14, SEQ ID NO: 16, SEQ ID NO: 20, SEQ ID NO: 22, SEQ ID NO: 24, SEQ ID NO: 26, SEQ ID NO: 28, SEQ ID NO. 30, SEQ ID NO: 32; SEQ ID NO: 65, SEQ ID NO: 67, SEQ ID NO: 69, SEQ ID NO: 71, SEQ ID NO: 73, SEQ ID NO: 75, SEQ ID NO: 77, SEQ ID NO: 79, SEQ ID NO: 81, SEQ ID NO: 83, SEQ ID NO: 85, SEQ ID NO: 87, SEQ ID NO: 89, SEQ ID NO: 91, SEQ ID NO: 93, SEQ ID NO: 95, SEQ ID NO: 97, SEQ ID NO: 99, SEQ ID NO: 101, SEQ ID NO: 103, SEQ ID NO: 105, SEQ ID NO: 107, SEQ ID NO: 109, SEQ ID NO: 111, SEQ ID NO: 113, SEQ ID NO: 115, SEQ ID NO: 117, SEQ ID NO: 119, SEQ ID NO: 121, SEQ ID NO: 123, SEQ ID NO: 125, SEQ ID NO: 127, SEQ ID NO: 129, SEQ ID NO: 131, SEQ ID NO: 133, SEQ ID NO: 135, SEQ ID NO: 137, SEQ ID NO: 139, SEQ ID NO: 141, SEQ ID NO: 143, SEQ ID NO: 152, SEQ ID NO: 154, SEQ ID NO: 156, SEQ ID NO: 158, SEQ ID NO: 160, SEQ ID NO: 162, SEQ ID NO: 164, SEQ ID NO: 166, SEQ ID NO: 168, SEQ ID NO: 170, SEQ ID NO: 172, SEQ ID NO: 174, SEQ ID NO: 176, SEQ ID NO: 178, SEQ ID NO: 180, SEQ ID NO: 182, SEQ ID NO: 184, SEQ ID NO: 186, SEQ ID NO: 188, SEQ ID NO: 190, SEQ ID NO: 192, SEQ ID NO: 194, SEQ ID NO: 196, SEQ ID NO: 198, SEQ ID NO: 200, SEQ ID NO: 202, SEQ ID NO: 204, SEQ ID NO: 206, SEQ ID NO: 208, SEQ ID NO: 210, SEQ ID NO: 212, SEQ ID NO: 214, SEQ ID NO: 216, SEQ ID NO: 218, SEQ ID NO: 220, SEQ ID NO: 229, SEQ ID NO:231, SEQ ID NO:233, SEQ ID NO: 235, SEQ ID NO: 237, SEQ ID NO: 239, SEQ ID NO: 241, SEQ ID NO: 243, SEQ ID NO: 250, SEQ ID NO: 252, SEQ ID NO: 254, SEQ ID NO: 256, SEQ ID NO: 258, SEQ ID NO: 260, SEQ ID NO: 262, SEQ ID NO: 264, SEQ ID NO: 266, SEQ ID NO: 268, SEQ ID NO: 270, SEQ ID NO: 272, SEQ ID NO: 283, SEQ ID NO: 285, SEQ ID NO: 287, SEQ ID NO: 289, SEQ ID NO: 291, SEQ ID NO: 293, SEQ ID NO: 295, SEQ ID NO: 297, SEQ ID NO: 299, SEQ ID NO: 301, SEQ ID NO: 303, SEQ ID NO: 305, SEQ ID NO: 307, SEQ ID NO: 309, SEQ ID NO: 311, SEQ ID NO: 313, SEQ ID NO: 315, SEQ ID NO: 317, SEQ ID NO: 319, SEQ ID NO: 321, SEQ ID NO: 323, SEQ ID NO: 325, SEQ ID NO: 327, SEQ ID NO: 329, SEQ ID NO: 331, SEQ ID NO: 333, SEQ ID NO: 335, SEQ ID NO: 337, SEQ ID NO: 339, SEQ ID NO: 341, SEQ ID NO: 343, SEQ ID NO: 345, SEQ ID NO: 347, SEQ ID NO: 349, SEQ ID NO: 351, SEQ ID NO: 353, SEQ ID NO: 355, SEQ ID NO: 357, SEQ ID NO: 359, SEQ ID NO: 361, SEQ ID NO: 363, SEQ ID NO: 365, SEQ ID NO: 367, SEQ ID NO: 369, SEQ ID NO: 371, SEQ ID NO: 373, SEQ ID NO: 375, SEQ ID NO: 377, SEQ ID NO: 379, SEQ ID NO: 381, SEQ ID NO: 383, SEQ ID NO: 385, SEQ ID NO: 387, SEQ ID NO: 389, SEQ ID NO: 391, SEQ ID NO: 393, SEQ ID NO: 395, SEQ ID NO: 397, SEQ ID NO: 399, SEQ ID NO: 401, SEQ ID NO: 403, SEQ ID NO: 405, SEQ ID NO: 407, SEQ ID NO: 409, SEQ ID NO: 411, SEQ ID NO: 413, SEQ ID NO: 415, SEQ ID NO: 417, SEQ ID NO: 419, SEQ ID NO: 421, SEQ ID NO: 423, SEQ ID NO: 425, SEQ ID NO: 427, SEQ ID NO: 429, SEQ ID NO: 431, SEQ ID NO: 433, SEQ ID NO: 435 or SEQ ID NO: 441.

[0441] For the comparison of amino acid sequences the same algorithms as described above or nucleic acid sequences can be used. Results of high quality are reached by using the algorithm of Needleman and Wunsch or Smith and Waterman. Therefore programs based on said algorithms are preferred. Advantageously the comparisons of sequences can be done with the program PileUp (J. Mol. Evolution, 25, 351-360, 1987, Higgins et al., CABIOS, 5 1989: 151-153) or preferably with the programs Gap and BestFit, which are respectively based on the algorithms of Needleman and Wunsch [J. Mol. Biol. 48; 443-453 (1970)] and Smith and Waterman [Adv. Appl. Math. 2; 482-489 (1981)]. Both programs are part of the GCG software-package [Genetics Computer Group, 575 Science Drive, Madison, Wis., USA 53711 (1991); Altschul et al. (1997) Nucleic Acids Res. 25:3389 et seq.]. Therefore preferably the calculations to determine the percentages of sequence homology are done with the program Gap over the whole range of the sequences. The following standard adjustments for the comparison of amino acid sequences were used: gap weight: 8, length weight: 2, average match: 2.912, average mismatch: −2.003.

[0442] Biologically active portions of an polypeptide of the present invention include peptides comprising amino acid sequences derived from the amino acid sequence of the polypeptide of the present invention, e.g., the amino acid sequence shown in SEQ ID NO: 2, SEQ ID NO: 4, SEQ ID NO: 6, SEQ ID NO: 8, SEQ ID NO: 10, SEQ ID NO: 12, SEQ ID NO: 14, SEQ ID NO: 16, SEQ ID NO: 20, SEQ ID NO: 22, SEQ ID NO: 24, SEQ ID NO: 26, SEQ ID NO: 28, SEQ ID NO. 30, SEQ ID NO: 32; SEQ ID NO: 65, SEQ ID NO: 67, SEQ ID NO: 69, SEQ ID NO: 71, SEQ ID NO: 73, SEQ ID NO: 75, SEQ ID NO: 77, SEQ ID NO: 79, SEQ ID NO: 81, SEQ ID NO: 83, SEQ ID NO: 85, SEQ ID NO: 87, SEQ ID NO: 89, SEQ ID NO: 91, SEQ ID NO: 93, SEQ ID NO: 95, SEQ ID NO: 97, SEQ ID NO: 99, SEQ ID NO: 101, SEQ ID NO: 103, SEQ ID NO: 105, SEQ ID NO: 107, SEQ ID NO: 109, SEQ ID NO: 111, SEQ ID NO: 113, SEQ ID NO: 115, SEQ ID NO: 117, SEQ ID NO: 119, SEQ ID NO: 121, SEQ ID NO: 123, SEQ ID NO: 125, SEQ ID NO: 127, SEQ ID NO: 129, SEQ ID NO: 131, SEQ ID NO: 133, SEQ ID NO: 135, SEQ ID NO: 137, SEQ ID NO: 139, SEQ ID NO: 141, SEQ ID NO: 143, SEQ ID NO: 152, SEQ ID NO: 154, SEQ ID NO: 156, SEQ ID NO: 158, SEQ ID NO: 160, SEQ ID NO: 162, SEQ ID NO: 164, SEQ ID NO: 166, SEQ ID NO: 168, SEQ ID NO: 170, SEQ ID NO: 172, SEQ ID NO: 174, SEQ ID NO: 176, SEQ ID NO: 178, SEQ ID NO: 180, SEQ ID NO: 182, SEQ ID NO: 184, SEQ ID NO: 186, SEQ ID NO: 188, SEQ ID NO: 190, SEQ ID NO: 192, SEQ ID NO: 194, SEQ ID NO: 196, SEQ ID NO: 198, SEQ ID NO: 200, SEQ ID NO: 202, SEQ ID NO: 204, SEQ ID NO: 206, SEQ ID NO: 208, SEQ ID NO: 210, SEQ ID NO: 212, SEQ ID NO: 214, SEQ ID NO: 216, SEQ ID NO: 218, SEQ ID NO: 220, SEQ ID NO: 229, SEQ ID NO:231, SEQ ID NO:233, SEQ ID NO: 235, SEQ ID NO: 237, SEQ ID NO: 239, SEQ ID NO: 241, SEQ ID NO: 243, SEQ ID NO: 250, SEQ ID NO: 252, SEQ ID NO: 254, SEQ ID NO: 256, SEQ ID NO: 258, SEQ ID NO: 260, SEQ ID NO: 262, SEQ ID NO: 264, SEQ ID NO: 266, SEQ ID NO: 268, SEQ ID NO: 270, SEQ ID NO: 272, SEQ ID NO: 283, SEQ ID NO: 285, SEQ ID NO: 287, SEQ ID NO: 289, SEQ ID NO: 291, SEQ ID NO: 293, SEQ ID NO: 295, SEQ ID NO: 297, SEQ ID NO: 299, SEQ ID NO: 301, SEQ ID NO: 303, SEQ ID NO: 305, SEQ ID NO: 307, SEQ ID NO: 309, SEQ ID NO: 311, SEQ ID NO: 313, SEQ ID NO: 315, SEQ ID NO: 317, SEQ ID NO: 319, SEQ ID NO: 321, SEQ ID NO: 323, SEQ ID NO: 325, SEQ ID NO: 327, SEQ ID NO: 329, SEQ ID NO: 331, SEQ ID NO: 333, SEQ ID NO: 335, SEQ ID NO: 337, SEQ ID NO: 339, SEQ ID NO: 341, SEQ ID NO: 343, SEQ ID NO: 345, SEQ ID NO: 347, SEQ ID NO: 349, SEQ ID NO: 351, SEQ ID NO: 353, SEQ ID NO: 355, SEQ ID NO: 357, SEQ ID NO: 359, SEQ ID NO: 361, SEQ ID NO: 363, SEQ ID NO: 365, SEQ ID NO: 367, SEQ ID NO: 369, SEQ ID NO: 371, SEQ ID NO: 373, SEQ ID NO: 375, SEQ ID NO: 377, SEQ ID NO: 379, SEQ ID NO: 381, SEQ ID NO: 383, SEQ ID NO: 385, SEQ ID NO: 387, SEQ ID NO: 389, SEQ ID NO: 391, SEQ ID NO: 393, SEQ ID NO: 395, SEQ ID NO: 397, SEQ ID NO: 399, SEQ ID NO: 401, SEQ ID NO: 403, SEQ ID NO: 405, SEQ ID NO: 407, SEQ ID NO: 409, SEQ ID NO: 411, SEQ ID NO: 413, SEQ ID NO: 415, SEQ ID NO: 417, SEQ ID NO: 419, SEQ ID NO: 421, SEQ ID NO: 423, SEQ ID NO: 425, SEQ ID NO: 427, SEQ ID NO: 429, SEQ ID NO: 431, SEQ ID NO: 433, SEQ ID NO: 435 or SEQ ID NO: 441 or the amino acid sequence of a protein homologous thereto, which include fewer amino acids than a full length protein having the biological activity of the protein of the invention or the polypeptide of the present invention or the full length protein which is homologous to a protein having the biological activity of the protein of the invention or the polypeptide of the present invention depicted herein, and exhibit at least one activity of the polypeptide of the present invention, which leads to an increase of the fine chemical. Typically, biologically (or immunologically) active portions i.e. peptides, e.g., peptides which are, for example, 5, 10, 15, 20, 30, 35, 36, 37, 38, 39, 40, 50, 100 or more amino acids in length comprise a domain or motif with at least one activity or epitope of a or of the polypeptide of the present invention. Moreover, other biologically active portions, in which other regions of the polypeptide are deleted, can be prepared by recombinant techniques and evaluated for one or more of the activities described herein.

[0443] Any mutagenesis strategies for the polypeptide of the present invention, which result in a decreasing biological activity disclosed herein are not meant to be limiting; variations on these strategies will be readily apparent to one skilled in the art. Using such strategies, and incorporating the mechanisms disclosed herein, the nucleic acid molecule and polypeptide of the invention may be utilized to generate plants or parts thereof, expressing mutated nucleic acid molecule and/or polypeptide molecules of the invention such that the yield, production, and/or efficiency of production of a desired compound such as the fine chemical is improved. This desired compound may be any natural product of plants, which includes the final products of biosynthesis pathways and intermediates of naturally-occurring metabolic pathways, as well as molecules which do not naturally occur in the metabolism of said cells, but which are produced by a said cells of the invention.

[0444] The invention also provides chimeric or fusion proteins.

[0445] As used herein, a “chimeric protein” or “fusion protein” comprises a polypeptide operatively linked to a polypeptide which does not confer above-mentioned activity, in particular, which does confer an increase of the fine chemical content in a cell or an organism or a part thereof, if its expression or activity is decreased, e.g. which does not confer a biological activity of the protein of the invention.

[0446] In one embodiment, a protein (=“polypeptide”) having the activity to increase the fine chemical content in the organism, by decreasing its biological activity. Said protein refers to a polypeptide having an amino acid sequence corresponding to the polypeptide of the invention, preferably having an amino acid sequence corresponding to the polypeptides as depicted in SEQ ID NO: 2, SEQ ID NO: 4, SEQ ID NO: 6, SEQ ID NO: 8, SEQ ID NO: 10, SEQ ID NO: 12, SEQ ID NO: 14, SEQ ID NO: 16, SEQ ID NO: 20, SEQ ID NO: 22, SEQ ID NO: 24, SEQ ID NO: 26, SEQ ID NO: 28, SEQ ID NO. 30, SEQ ID NO: 32; SEQ ID NO: 65, SEQ ID NO: 67, SEQ ID NO: 69, SEQ ID NO: 71, SEQ ID NO: 73, SEQ ID NO: 75, SEQ ID NO: 77, SEQ ID NO: 79, SEQ ID NO: 81, SEQ ID NO: 83, SEQ ID NO: 85, SEQ ID NO: 87, SEQ ID NO: 89, SEQ ID NO: 91, SEQ ID NO: 93, SEQ ID NO: 95, SEQ ID NO: 97, SEQ ID NO: 99, SEQ ID NO: 101, SEQ ID NO: 103, SEQ ID NO: 105, SEQ ID NO: 107, SEQ ID NO: 109, SEQ ID NO: 111, SEQ ID NO: 113, SEQ ID NO: 115, SEQ ID NO: 117, SEQ ID NO: 119, SEQ ID NO: 121, SEQ ID NO: 123, SEQ ID NO: 125, SEQ ID NO: 127, SEQ ID NO: 129, SEQ ID NO: 131, SEQ ID NO: 133, SEQ ID NO: 135, SEQ ID NO: 137, SEQ ID NO: 139, SEQ ID NO: 141, SEQ ID NO: 143, SEQ ID NO: 152, SEQ ID NO: 154, SEQ ID NO: 156, SEQ ID NO: 158, SEQ ID NO: 160, SEQ ID NO: 162, SEQ ID NO: 164, SEQ ID NO: 166, SEQ ID NO: 168, SEQ ID NO: 170, SEQ ID NO: 172, SEQ ID NO: 174, SEQ ID NO: 176, SEQ ID NO: 178, SEQ ID NO: 180, SEQ ID NO: 182, SEQ ID NO: 184, SEQ ID NO: 186, SEQ ID NO: 188, SEQ ID NO: 190, SEQ ID NO: 192, SEQ ID NO: 194, SEQ ID NO: 196, SEQ ID NO: 198, SEQ ID NO: 200, SEQ ID NO: 202, SEQ ID NO: 204, SEQ ID NO: 206, SEQ ID NO: 208, SEQ ID NO: 210, SEQ ID NO: 212, SEQ ID NO: 214, SEQ ID NO: 216, SEQ ID NO: 218, SEQ ID NO: 220, SEQ ID NO: 229, SEQ ID NO:231, SEQ ID NO:233, SEQ ID NO: 235, SEQ ID NO: 237, SEQ ID NO: 239, SEQ ID NO: 241, SEQ ID NO: 243, SEQ ID NO: 250, SEQ ID NO: 252, SEQ ID NO: 254, SEQ ID NO: 256, SEQ ID NO: 258, SEQ ID NO: 260, SEQ ID NO: 262, SEQ ID NO: 264, SEQ ID NO: 266, SEQ ID NO: 268, SEQ ID NO: 270, SEQ ID NO: 272, SEQ ID NO: 283, SEQ ID NO: 285, SEQ ID NO: 287, SEQ ID NO: 289, SEQ ID NO: 291, SEQ ID NO: 293, SEQ ID NO: 295, SEQ ID NO: 297, SEQ ID NO: 299, SEQ ID NO: 301, SEQ ID NO: 303, SEQ ID NO: 305, SEQ ID NO: 307, SEQ ID NO: 309, SEQ ID NO: 311, SEQ ID NO: 313, SEQ ID NO: 315, SEQ ID NO: 317, SEQ ID NO: 319, SEQ ID NO: 321, SEQ ID NO: 323, SEQ ID NO: 325, SEQ ID NO: 327, SEQ ID NO: 329, SEQ ID NO: 331, SEQ ID NO: 333, SEQ ID NO: 335, SEQ ID NO: 337, SEQ ID NO: 339, SEQ ID NO: 341, SEQ ID NO: 343, SEQ ID NO: 345, SEQ ID NO: 347, SEQ ID NO: 349, SEQ ID NO: 351, SEQ ID NO: 353, SEQ ID NO: 355, SEQ ID NO: 357, SEQ ID NO: 359, SEQ ID NO: 361, SEQ ID NO: 363, SEQ ID NO: 365, SEQ ID NO: 367, SEQ ID NO: 369, SEQ ID NO: 371, SEQ ID NO: 373, SEQ ID NO: 375, SEQ ID NO: 377, SEQ ID NO: 379, SEQ ID NO: 381, SEQ ID NO: 383, SEQ ID NO: 385, SEQ ID NO: 387, SEQ ID NO: 389, SEQ ID NO: 391, SEQ ID NO: 393, SEQ ID NO: 395, SEQ ID NO: 397, SEQ ID NO: 399, SEQ ID NO: 401, SEQ ID NO: 403, SEQ ID NO: 405, SEQ ID NO: 407, SEQ ID NO: 409, SEQ ID NO: 411, SEQ ID NO: 413, SEQ ID NO: 415, SEQ ID NO: 417, SEQ ID NO: 419, SEQ ID NO: 421, SEQ ID NO: 423, SEQ ID NO: 425, SEQ ID NO: 427, SEQ ID NO: 429, SEQ ID NO: 431, SEQ ID NO: 433, SEQ ID NO: 435 or SEQ ID NO: 441, whereas a “non-protein of the invention polypeptide” refers to a polypeptide having an amino acid sequence corresponding to a protein which is not substantially homologous to a polypeptide of the invention, preferably which is not substantially homologous to a polypeptide having the biological activity of the protein of the invention, e.g., a protein which does not confer the activity described herein and which is derived from the same or a different organism.

[0447] Within the fusion protein, the term “operatively linked” is intended to indicate that the polypeptide of the invention and the other polypeptide or part thereof are fused to each other so that both sequences fulfil the proposed function addicted to the sequence used. The other polypeptide can be fused to the N-terminus or C-terminus of the polypeptide of the invention. For example, in one embodiment the fusion protein is a GST-LMRP fusion protein in which the sequences of the polypeptide of the invention are fused to the C-terminus of the GST sequences. Such fusion proteins can facilitate the purification of recombinant polypeptides of the invention.

[0448] In another embodiment, the fusion protein is a polypeptide of the invention containing a heterologous signal sequence at its N-terminus. In certain host cells (e.g., mammalian host cells), expression and/or secretion of the protein of the invention decreased in its biological activity can be increased through use of a heterologous signal sequence. Such sequences are for example targeting sequences. As already mentioned above, targeting sequences, are required for targeting the gene product into specific cell compartment (for a review, see Kermode, Crit. Rev. Plant Sci. 15, 4 (1996) 285-423 and references cited therein), for example into the vacuole, the nucleus, all types of plastids, such as amyloplasts, chloroplasts, chromoplasts, the extracellular space, the mitochondria, the endoplasmic reticulum, elaioplasts, peroxisomes, glycosomes, and other compartments of cells or extracellular. Sequences, which must be mentioned in this context, are, in particular, the signal-peptide- or transit-peptide-encoding sequences, which are known per se. For example, plastid-transit-peptide-encoding sequences enable the targeting of the expression product into the plastids of a plant cell. Targeting sequences are also known for eukaryotic and to a lower extent for prokaryotic organisms and can advantageously be operable linked with the nucleic acid molecule of the present invention to achieve an expression in one of said compartments or extracellular.

[0449] Preferably, a chimeric or fusion protein of the invention is produced by standard recombinant DNA techniques. For example, DNA fragments coding for the different polypeptide sequences are ligated together in-frame in accordance with conventional techniques, for example by employing blunt-ended or stagger-ended termini for ligation, restriction enzyme digestion to provide for appropriate termini, filling-in of cohesive ends as appropriate, alkaline phosphatase treatment to avoid undesirable joining, and enzymatic ligation. The fusion gene can be synthesized by conventional techniques including automated DNA synthesizers. Alternatively, PCR amplification of gene fragments can be carried out using anchor primers, which give rise to complementary overhangs between two consecutive gene fragments which can subsequently be annealed and reamplified to generate a chimeric gene sequence (see, for example, Current Protocols in Molecular Biology, eds. Ausubel et al. John Wiley & Sons: 1992). Moreover, many expression vectors are commercially available that already encode a fusion moiety (e.g., a GST polypeptide). The nucleic acid molecule of the invention can be cloned into such an expression vector such that the fusion moiety is linked in-frame to the encoded protein

[0450] Furthermore, folding simulations and computer redesign of structural motifs of the protein of the invention can be performed using appropriate computer programs (Olszewski, Proteins 25 (1996), 286-299; Hoffman, Comput. Appl. Biosci. 11 (1995), 675-679). Computer modeling of protein folding can be used for the conformational and energetic analysis of detailed peptide and protein models (Monge, J. Mol. Biol. 247 (1995), 995-1012; Renouf, Adv. Exp. Med. Biol. 376 (1995), 37-45). The appropriate programs can be used for the identification of interactive sites of the polypeptide of the invention and its substrates or binding factors or other interacting proteins by computer assistant searches for complementary peptide sequences (Fassina, Immunomethods (1994), 114-120). Further appropriate computer systems for the design of protein and peptides are described in the prior art, for example in Berry, Biochem. Soc. Trans. 22 (1994), 1033-1036; Wodak, Ann. N.Y. Acad. Sci. 501 (1987), 1-13; Pabo, Biochemistry 25 (1986), 5987-5991 The results obtained from the above-described computer analysis can be used for, e.g., the preparation of peptidomimetics of the protein of the invention or fragments thereof. Such pseudopeptide analogues of the, natural amino acid sequence of the protein may very efficiently mimic the parent protein (Benkirane, J. Biol. Chem. 271 (1996), 33218-33224). For example, incorporation of easily available achiral Q-amino acid residues into a protein of the invention or a fragment thereof results in the substitution of amide bonds by polymethylene units of an aliphatic chain, thereby providing a convenient strategy for constructing a peptidomimetic (Banerjee, Biopolymers 39 (1996), 769-777).

[0451] Superactive peptidomimetic analogues of small peptide hormones in other systems are described in the prior art (Zhang, Biochem. Biophys. Res. Commun. 224 (1996), 327-331). Appropriate peptidomimetics of the protein of the present invention can also be identified by the synthesis of peptidomimetic combinatorial libraries through successive amide alkylation and testing the resulting compounds, e.g., for their binding and immunological properties. Methods for the generation and use of peptidomimetic combinatorial libraries are described in the prior art, for example in Ostresh, Methods in Enzymology 267 (1996), 220-234 and Dorner, Bioorg. Med. Chem. 4 (1996), 709-715.

[0452] Furthermore, a three-dimensional and/or crystallographic structure of the protein of the invention can be used for the design of peptidomimetic inhibitors of the biological activity of the protein of the invention (Rose, Biochemistry 35 (1996), 12933-12944; Rutenber, Bioorg. Med. Chem. 4 (1996), 1545-1558).

[0453] Furthermore, a three-dimensional and/or crystallographic structure of the protein of the invention and the identification of interactive sites the polypeptide of the invention and its substrates or binding factors can be used for design of mutants with modulated binding or turn over activities. For example, the active center of the polypeptide of the present invention can be modelled and amino acid residues participating in the catalytic reaction can be modulated to increase or decrease the binding of the substrate to inactivate the polypeptide. The identification of the active center and the amino acids involved in the catalytic reaction facilitates the screening for mutants having an increased activity.

[0454] The sequence shown in SEQ ID NO: 2 has been described under its Accession Number At2g25320 as a hypothetical proteins, which has a weak similarity to the ubiquitin-specific protease 12. However, an activity of the protein disclosed under the Accession Number At2g25320 has not been proven experimentally as yet. The protein depicted in SEQ ID NO: 8 is deposited in Genebank under the Accession Number At3g07610. The protein contains a protein domain, which is similar to the transcription factor jumonji domain. The activity of the protein is still unknown. The protein depicted in SEQ ID NO: 20 and deposited at Genebank under the Accession Number At3g15600 is similar to an En/Spm-like transposon protein. The function and activity of the protein is unknown. The protein depicted in SEQ ID NO: 65 and deposited at the Genebank under the Accession Number At1g14490 is possibly a DNA-binding protein. Accession Number At3g30570, which has SEQ ID NO: 152 is a putative serine/thronine protein kinase. The protein depicted in SEQ ID NO: 229 and deposited at the Genebank under the Accession Number At2g21290 has an unknown function. Furthermore the protein depicted in SEQ ID NO: 283 and deposited at the Genebank under the Accession Number At3g14230 is a transcription factor EREBP-like protein.

[0455] One embodiment of the invention also relates to an antibody, which binds specifically to the polypeptide according to the invention or parts, i.e. specific fragments or epitopes of such a protein.

[0456] The antibodies of the invention can be used to identify and isolate the polypeptide according to the invention and encoding genes in any organism, preferably plants, prepared in plants described herein. Such antibodies can also be expressed in the suitable host organisms thereby reducing the biological activity of the genes of the invention by binding to their protein products leading for example to a steric interference with their biological activity. These antibodies can be monoclonal antibodies, polyclonal antibodies or synthetic antibodies as well as fragments of antibodies, such as Fab, Fv or scFv fragments etc. Monoclonal antibodies can be prepared, for example, by the techniques as originally described in Köhler and Milstein, Nature 256 (1975), 495, and Galfr6, Meth. Enzymol. 73 (1981), 3, which comprise the fusion of mouse myeloma cells to spleen cells derived from immunized mammals.

[0457] Furthermore, antibodies or fragments thereof to the aforementioned peptides can be obtained by using methods, which are described, e.g., in Harlow and Lane “Antibodies, A Laboratory Manual”, CSH Press, Cold Spring Harbor, 1988. These antibodies can be used, for example, for the immunoprecipitation and immunolocalization of proteins according to the invention as well as for the monitoring of the synthesis of such proteins, for example, in recombinant organisms, and for the identification of compounds interacting with the protein according to the invention. For example, surface plasmon resonance as employed in the BIAcore system can be used to increase the efficiency of phage antibodies selections, yielding a high increment of affinity from a single library of phage antibodies, which bind to an epitope of the protein of the invention (Schier, Human Antibodies Hybridomas 7 (1996), 97-105; Malmborg, J. Immunol. Methods 183 (1995), 7-13). In many cases, the binding phenomena of antibodies to antigens is equivalent to other ligand/anti-ligand binding.

[0458] A further embodiment of the invention also relates to a method for the generation of a transgenic host cell, e.g. a eukaryotic or prokaryotic host or host cell, preferably a transgenic microorganism, a transgenic plant cell or a transgenic plant tissue or a transgenic plant, which comprises introducing, into the plant, the plant cell or the plant tissue, the nucleic acid construct according to the invention, the vector according to the invention, or the nucleic acid molecule according to the invention.

[0459] A further embodiment of the invention also relates to a method for the transient generation of a host or host cell, eukaryotic or prokaryotic cell, preferably a transgenic microorganism, a transgenic plant cell or a transgenic plant tissue or a transgenic plant, which comprises introducing, into the plant, the plant cell or the plant tissue, the nucleic acid construct according to the invention, the vector according to the invention, the nucleic acid molecule characterized herein as being contained in the nucleic acid construct of the invention or the nucleic acid molecule according to the invention, whereby the introduced nucleic acid molecules, nucleic acid construct and/or vector is not integrated into the genome of the host or host cell. Therefore the transformants are not stable during the propagation of the host in respect of the introduced nucleic acid molecules, nucleic acid construct and/or vector.

[0460] In the process according to the invention, transgenic organisms are also to be understood as meaning—if they take the form of plants—plant cells, plant tissues, plant organs such as root, shoot, stem, seed, flower, tuber or leaf, or intact plants which are grown for the production of amino acids.

[0461] Growing is to be understood as meaning for example culturing the transgenic plant cells, plant tissue or plant organs on or in a nutrient medium or the intact plant on or in a substrate, for example in hydroponic culture, potting compost or on a field soil.

[0462] In a further advantageous embodiment of the process, the nucleic acid molecules can be expressed in single-celled plant cells (such as algae), see Falciatore et al., 1999, Marine Biotechnology 1 (3): 239-251 and references cited therein, and plant cells from higher plants (for example spermatophytes such as crops). Examples of plant expression vectors encompass those which are described in detail herein or in: Becker, D. [(1992) Plant Mol. Biol. 20:1195-1197] and Bevan, M. W. [(1984), Nucl. Acids Res. 12:8711-8721; Vectors for Gene Transfer in Higher Plants; in: Transgenic Plants, Vol. 1, Engineering and Utilization, Ed.: Kung and R. Wu, Academic Press, 1993, pp. 15-38]. An overview of binary vectors and their use is also found in Hellens, R. [(2000), Trends in Plant Science, Vol. 5 No. 10, 446-451.

[0463] Vector DNA can be introduced into prokaryotic or eukaryotic cells via conventional transformation or transfection techniques. The terms “transformation” and “transfection” include conjugation and transduction and, as used in the present context, are intended to encompass a multiplicity of prior-art methods for introducing foreign nucleic acid molecules (for example DNA) into a host cell, including calcium phosphate coprecipitation or calcium chloride coprecipitation, DEAE-dextran-mediated transfection, PEG-mediated transfection, lipofection, natural competence, chemically mediated transfer, electroporation or particle bombardment. Suitable methods for the transformation or transfection of host cells, including plant cells, can be found in Sambrook et al. (Molecular Cloning: A Laboratory Manual., 2^{nd} Ed., Cold Spring Harbor Laboratory, Cold Spring Harbor Laboratory Press, Cold Spring Harbor, N.Y., 1989) and in other laboratory handbooks such as Methods in Molecular Biology, 1995, Vol. 44, Agrobacterium protocols, Ed.: Gartland and Davey, Humana Press, Totowa, N.J.

[0464] The above-described methods for the transformation and regeneration of plants from plant tissues or plant cells are exploited for transient or stable transformation of plants. Suitable methods are the transformation of protoplasts by polyethylene-glycol-induced DNA uptake, the biolistic method with the gene gun—known as the particle bombardment method—, electroporation, the incubation of dry embryos in DNA-containing solution, microinjection and the Agrobacterium-mediated gene transfer. The abovementioned methods are described for example in B. Jenes, Techniques for Gene Transfer, in: Transgenic Plants, Vol. 1, Engineering and Utilization, edited by S. D. Kung and R. Wu, Academic Press (1993) 128-143 and in Potrykus Annu. Rev. Plant Physiol. Plant Molec. Biol. 42 (1991) 205-225. The construct to be expressed is preferably cloned into a vector, which is suitable for transforming Agrobacterium tumefaciens, for example pBin19 (Bevan, Nucl. Acids Res. 12 (1984) 8711). Agrobacteria transformed with such a vector can then be used in the known manner for the transformation of plants, in particular crop plants, such as, for example, tobacco plants, for example by bathing scarified leaves or leaf segments in an agrobacterial solution and subsequently culturing them in suitable media. The transformation of plants with Agrobacterium tumefaciens is described for example by Höfgen and Willmitzer in Nucl. Acid Res. (1988) 16, 9877 or known from, inter alia, F. F. White, Vectors for Gene Transfer in Higher Plants; in Transgenic Plants, Vol. 1, Engineering and Utilization, edited by S. D. Kung and R. Wu, Academic Press, 1993, pp. 15-38.

[0465] To select for the successful transfer of the nucleic acid molecule, vector or nucleic acid construct of the invention according to the invention into a host organism, it is advantageous to use marker genes as have already been described above in detail. It is known of the stable or transient integration of nucleic acids into plant cells that only a minority of the cells takes up the foreign DNA and, if desired, integrates it into its genome, depending on the expression vector used and the transfection technique used. To identify and select these integrants, a gene encoding for a selectable marker (as described above, for example resistance to antibiotics) is usually introduced into the host cells together with the gene of interest. Preferred selectable markers in plants comprise those, which confer resistance to an herbicide such as glyphosate or gluphosinate. Other suitable markers are, for example, markers, which encode genes involved in biosynthetic pathways of, for example, sugars or amino acids, such as β-galactosidase, ura3 or ilv2. Markers, which encode genes such as luciferase, gfp or other fluorescence genes, are likewise suitable. These markers and the aforementioned markers can be used in mutants in whom these genes are not functional since, for example, they have been deleted by conventional methods. Furthermore, nucleic acid molecules, which encode a selectable marker, can be introduced into a host cell on the same vector as those, which encode the polypeptides of the invention or used in the process or else in a separate vector. Cells which have been transfected stably with the nucleic acid introduced can be identified for example by selection (for example, cells which have integrated the selectable marker survive whereas the other cells die).

[0466] Since the marker genes, as a rule specifically the gene for resistance to antibiotics and herbicides, are no longer required or are undesired in the transgenic host cell once the nucleic acids have been introduced successfully, the process according to the invention for introducing the nucleic acids advantageously employs techniques which enable the removal, or excision, of these marker genes. One such a method is what is known as cotransformation. The cotransformation method employs two vectors simultaneously for the transformation, one vector bearing the nucleic acid according to the invention and a second bearing the marker gene(s). A large proportion of transformants receives or, in the case of plants, comprises (up to 40% of the transformants and above), both vectors. The marker genes can subsequently be removed from the transformed plant by performing crosses. In another method, marker genes integrated into a transposon are used for the transformation together with desired nucleic acid (known as the Ac/Ds technology). In some cases (approx. 10%), the transposon jumps out of the genome of the host cell once transformation has taken place successfully and is lost. In a further number of cases, the transposon jumps to a different location. In these cases, the marker gene must be eliminated by performing crosses. In microbiology, techniques were developed which make possible, or facilitate, the detection of such events. A further advantageous method relies on what are known as recombination systems, whose advantage is that elimination by crossing can be dispensed with. The best-known system of this type is what is known as the Cre/lox system. Cre1 is a recombinase, which removes the sequences located between the loxP sequence. If the marker gene is integrated between the loxP sequence, it is removed, once transformation has taken place successfully, by expression of the recombinase. Further recombination systems are the HIN/HIX, FLP/FRT and REP/STB system (Tribble et al., J. Biol. Chem., 275, 2000: 22255-22267; Velmurugan et al., J. Cell Biol., 149, 2000: 553-566). A site-specific integration into the plant genome of the nucleic acid sequences according to the invention is possible. Naturally, these methods can also be applied to microorganisms such as yeast, fungi or bacteria.

[0467] Agrobacteria transformed with an expression vector according to the invention may also be used in the manner known per se for the transformation of plants such as experimental plants like Arabidopsis or crop plants, such as, for example, cereals, maize, oats, rye, barley, wheat, soya, rice, cotton, sugarbeet, canola, sunflower, flax, hemp, potato, tobacco, tomato, carrot, bell peppers, oilseed rape, tapioca, cassava, arrow root, tagetes, alfalfa, lettuce and the various tree, nut, and grapevine species, in particular oil-containing crop plants such as soya, peanut, castor-oil plant, sunflower, maize, cotton, flax, oilseed rape, coconut, oil palm, safflower (Carthamus tinctorius) or cocoa beans, for example by bathing scarified leaves or leaf segments in an agrobacterial solution and subsequently growing them in suitable media.

[0468] In addition to the transformation of somatic cells, which then has to be regenerated into intact plants, it is also possible to transform the cells of plant meristems and in particular those cells which develop into gametes. In this case, the transformed gametes follow the natural plant development, giving rise to transgenic plants. Thus, for example, seeds of Arabidopsis are treated with agrobacteria and seeds are obtained from the developing plants of which a certain proportion is transformed and thus transgenic (Feldman, K A and Marks M D (1987). Mol Gen Genet 208:274-289; Feldmann K (1992). In: C Koncz, N-H Chua and J Shell, eds, Methods in Arabidopsis Research. Word Scientific, Singapore, pp. 274-289). Alternative methods are based on the repeated removal of the influorescences and incubation of the excision site in the center of the rosette with transformed agrobacteria, whereby transformed seeds can likewise be obtained at a later point in time (Chang (1994). Plant J. 5: 551-558; Katavic (1994). Mol Gen Genet, 245: 363-370). However, an especially effective method is the vacuum infiltration method with its modifications such as the “floral dip” method. In the case of vacuum infiltration of Arabidopsis, intact plants under reduced pressure are treated with an agrobacterial suspension (Bechthold, N (1993). C R Acad Sci Paris Life Sci, 316: 1194-1199), while in the case of the “floral dip” method the developing floral tissue is incubated briefly with a surfactant-treated agrobacterial suspension (Clough, S J und Bent, A F (1998). The Plant J. 16, 735-743). A certain proportion of transgenic seeds are harvested in both cases, and these seeds can be distinguished from nontransgenic seeds by growing under the above-described selective conditions.

[0469] The genetically modified plant cells can be regenerated via all methods with which the skilled worker is familiar. Suitable methods can be found in the abovementioned publications by S. D. Kung and R. Wu, Potrykus or Höfgen and Willmitzer.

[0470] Accordingly, the present invention thus also relates to a plant cell comprising the nucleic acid construct according to the invention, the nucleic acid molecule according to the invention or the vector according to the invention.

[0471] Accordingly the present invention relates to any cell transgenic for any nucleic acid characterized as part of the invention, e.g. conferring the increase of the fine chemical in a cell or an organism or a part thereof, e.g. the nucleic acid molecule of the invention, the nucleic acid construct of the invention, the antisense molecule of the invention, the vector of the invention or a nucleic acid molecule encoding the polypeptide of the invention, e.g. encoding a polypeptide having biological activity of the protein of the invention. Due to the abovementioned activity the fine chemical content in a cell or an organism is increased. For example, due to modulation or manipulation, the cellular activity is increased y, e.g. due to a decreased expression or decreased specific activity of the subject matters of the invention in a cell or an organism or a part thereof.

[0472] A naturally occurring expression cassette—for example the naturally occurring combination of the promoter of the protein of the invention with the corresponding gene, which codes for the protein of the invention—becomes a transgenic expression cassette when it is modified by non-natural, synthetic “artificial” methods such as, for example, mutagenization. Such methods have been described (U.S. Pat. No. 5,565,350; WO 00/15815; also see above).

[0473] Further, the plant cell, plant tissue or plant can also be transformed such that further enzymes and proteins are (over)expressed which expression supports an increase of the fine chemical.

[0474] The term “transgenic plants” used in accordance with the invention refers to the progeny of a transgenic plant, for example the T₁, T₂, T₃ and subsequent plant generations or the BC₁, BC₂, BC₃ and subsequent plant generations. Thus, the transgenic plants according to the invention can be raised and selfed or crossed with other individuals in order to obtain further transgenic plants according to the invention. Transgenic plants may also be obtained by propagating transgenic plant cells vegetatively. The present invention also relates to transgenic plant material, which can be derived from a transgenic plant population according to the invention. Such material includes plant cells and certain tissues, organs and parts of plants in all their manifestations, such as seeds, leaves, anthers, fibers, tubers, roots, root hairs, stems, embryo, calli, cotelydons, petioles, harvested material, plant tissue, reproductive tissue and cell cultures, which are derived from the actual transgenic plant and/or can be used for bringing about the transgenic plant.

[0475] Any transformed plant obtained according to the invention can be used in a conventional breeding scheme or in in vitro plant propagation to produce more transformed plants with the same characteristics and/or can be used to introduce the same characteristic in other varieties of the same or related species. Such plants are also part of the invention. Seeds obtained from the transformed plants genetically also contain the same characteristic and are part of the invention. As mentioned before, the present invention is in principle applicable to any plant and crop that can be transformed with any of the transformation method known to those skilled in the art.

[0476] In an especially preferred embodiment, the organism, the host cell, plant cell, plant, microorganism or plant tissue according to the invention is transgenic.

[0477] Accordingly, the invention therefore relates to transgenic organisms transformed with at least one nucleic acid molecule, nucleic acid construct or vector according to the invention, and to cells, cell cultures, tissues, parts—such as, for example, in the case of plant organisms, plant tissue, for example leaves, roots and the like—or propagation material derived from such organisms, or intact plants. The terms “recombinant (host)” and “transgenic (host)” are used interchangeably in this context. Naturally, these terms refer not only to the host organism or target cell in question, but also to the progeny, or potential progeny, of these organisms or cells. Since certain modifications may occur in subsequent generations owing to mutation or environmental effects, such progeny is not necessarily identical with the parental cell, but still comes within the scope of the term as used herein.

[0478] Suitable organisms for the process according to the invention or as hosts are all these eukaryotic or prokaryotic organisms, which are capable of synthesizing the fine chemical. The organisms used as hosts are microorganisms, such as bacteria, fungi, yeasts or algae, non-human animals, or plants, such as dictotyledonous or monocotyledonous plants.

[0479] In principle all plants can be used as host organism, especially the plants mentioned above as source organism. Preferred transgenic plants are, for example, selected from the families Aceraceae, Anacardiaceae, Apiaceae, Asteraceae, Brassicaceae, Cactaceae, Cucurbitaceae, Euphorbiaceae, Fabaceae, Malvaceae, Nymphaeaceae, Papaveraceae, Rosaceae, Salicaceae, Solanaceae, Arecaceae, Bromeliaceae, Cyperaceae, Iridaceae, Liliaceae, Orchidaceae, Gentianaceae, Labiaceae, Magnoliaceae, Ranunculaceae, Carifolaceae, Rubiaceae, Scrophulariaceae, Caryophyllaceae, Ericaceae, Polygonaceae, Violaceae, Juncaceae or Poaceae and preferably from a plant selected from the group of the families Apiaceae, Asteraceae, Brassicaceae, Cucurbitaceae, Fabaceae, Papaveraceae, Rosaceae, Solanaceae, Liliaceae or Poaceae. Preferred are crop plants such as plants advantageously selected from the group of the genus peanut, oilseed rape, canola, sunflower, safflower, olive, sesame, hazelnut, almond, avocado, bay, pumpkin/squash, linseed, soya, pistachio, borage, maize, wheat, rye, oats, sorghum and millet, triticale, rice, barley, cassava, potato, sugarbeet, egg plant, alfalfa, and perennial grasses and forage plants, oil palm, vegetables (brassicas, root vegetables, tuber vegetables, pod vegetables, fruiting vegetables, onion vegetables, leafy vegetables and stem vegetables), buckwheat, Jerusalem artichoke, broad bean, vetches, lentil, dwarf bean, lupin, clover and Lucerne for mentioning only some of them.

[0480] Preferred plant cells, plant organs, plant tissues or parts of plants originate from the under source organism mentioned plant families, preferably from the abovementioned plant genus, more preferred from abovementioned plants species.

[0481] Transgenic plants comprising the fine chemical synthesized in the process according to the invention can be marketed directly without isolation of the compounds synthesized. In the process according to the invention, plants are understood as meaning all plant parts, plant organs such as leaf, stalk, root, tubers or seeds or propagation material or harvested material or the intact plant. In this context, the seed encompasses all parts of the seed such as the seed coats, epidermal cells, seed cells, endosperm or embryonic tissue. The fine chemical produced in the process according to the invention may, however, also be isolated from the plant in the form of the free compound or bound to other components of the plant. The fine chemical produced by this process can be harvested by harvesting the organisms either from the culture in which they grow or from the field. This can be done vi a expressing, grinding and/or extraction, salt precipitation and/or ion-exchange chromatography of the plant parts, preferably the plant seeds, plant fruits, plant tubers and the like.

[0482] In a further embodiment, the present invention relates to a process for the generation of a microorganism, comprising the introduction, into the microorganism or parts thereof, of the nucleic acid construct of the invention, or the vector of the invention or the nucleic acid molecule of the invention.

[0483] In another embodiment, the present invention relates also to a transgenic microorganism comprising the nucleic acid molecule of the invention, the nucleic acid construct of the invention or the vector as of the invention. Appropriate microorganisms have been described herein before under source organism, preferred are in particular aforementioned strains suitable for the production of fine chemicals.

[0484] Accordingly, the present invention relates also to a process according to the present invention whereby the fine chemical produced in the inventive process is isolated.

[0485] In this manner, more than 50% by weight, advantageously more than 60% by weight, preferably more than 70% by weight, especially preferably more than 80% by weight, very especially preferably more than 90% by weight, of the fine chemical produced in the process can be isolated. The resulting fine chemical can, if appropriate, subsequently be further purified, if desired mixed with other active ingredients such as vitamins, amino acids, carbohydrates, antibiotics and the like, and, if appropriate, formulated.

[0486] The amino acids obtained in the process are suitable as starting material for the synthesis of further products of value. For example, they can be used in combination with each other or alone for the production of pharmaceuticals, foodstuffs, animal feeds or cosmetics. Accordingly, the present invention relates a method for the production of pharmaceuticals, food stuff, animal feeds, nutrients or cosmetics comprising the steps of the process according to the invention, including the isolation of the amino acid composition produced or the produced methionine if desired and formulating the product with a pharmaceutical acceptable carrier or formulating the product in a form acceptable for an application in agriculture. A further embodiment according to the invention is the use of the amino acids produced in the process or of the transgenic organisms in animal feeds, foodstuffs, medicines, food supplements, cosmetics or pharmaceuticals. Yet another embodiment of the invention is a composition comprising the protein of the invention, the nucleic acid molecule of the invention, the polypeptide of the invention, the nucleic acid construct or the vector of the invention, the antagonist of the invention, the antibody of the invention and optionally a agricultural acceptable carrier.

[0487] In principle all microorganisms can be used as host organism especially the ones mentioned under source organism above. It is advantageous to use in the process of the invention transgenic microorganisms such as fungi such as the genus Claviceps or Aspergillus or Gram-positive bacteria such as the genera Bacillus, Corynebacterium, Micrococcus, Brevibacterium, Rhodococcus, Nocardia, Caseobacter or Arthrobacter or Gram-negative bacteria such as the genera Escherichia, Flavobacterium or Salmonella or yeasts such as the genera Rhodotorula, Hansenula or Candida. Particularly advantageous organisms are selected from the group of genera Corynebacterium, Brevibacterium, Escherichia, Bacillus, Rhodotorula, Hansenula, Candida, Claviceps or Flavobacterium. It is very particularly advantageous to use in the process of the invention microorganisms selected from the group of genera and species consisting of Hansenula anomala, Candida utilis, Claviceps purpurea, Bacillus circulans, Bacillus subtilis, Bacillus sp., Brevibacterium albidum, Brevibacterium album, Brevibacterium cerinum, Brevibacterium flavum, Brevibacterium glutamigenes, Brevibacterium iodinum, Brevibacterium ketoglutamicum, Brevibacterium lactofermentum, Brevibacterium linens, Brevibacterium roseum, Brevibacterium saccharolyticum, Brevibacterium sp., Corynebacterium acetoaciclophilum, Corynebacterium acetoglutamicum, Corynebacterium ammoniagenes, Corynebacterium glutamicum (=Micrococcus glutamicum), Corynebacterium melassecola, Corynebacterium sp. or Escherichia coli, specifically Escherichia coli K12 and its described strains.

[0488] The process of the invention is, when the host organisms are microorganisms, advantageously carried out at a temperature between 0° C. and 95° C., preferably between 10° C. and 85° C., particularly preferably between 15° C. and 75° C., very particularly preferably between 15° C. and 45° C. The pH is advantageously kept at between pH 4 and 12, preferably between pH 6 and 9, particularly preferably between pH 7 and 8, during this. The process of the invention can be operated batchwise, semibatchwise or continuously. A summary of known cultivation methods is to be found in the textbook by Chmiel (Bioprozeβtechnik 1. Einführung in die Bioverfahrenstechnik (Gustav Fischer Verlag, Stuttgart, 1991)) or in the textbook by Storhas (Bioreaktoren und periphere Einrichtungen (Vieweg Verlag, Braunschweig/Wiesbaden, 1994)). The culture medium to be used must meet the requirements of the respective strains in a suitable manner. Descriptions of culture media for various microorganisms are present in the handbook “Manual of Methods for General Bacteriology” of the American Society for Bacteriology (Washington D.C., USA, 1981). These media, which can be employed according to the invention include, as described above, usually one or more carbon sources, nitrogen sources, inorganic salts, vitamins and/or trace elements. Preferred carbon sources are sugars such as mono-, di- or polysaccharides. Examples of very good carbon sources are glucose, fructose, mannose, galactose, ribose, sorbose, ribulose, lactose, maltose, sucrose, raffinose, starch or cellulose. Sugars can also be added to the media via complex compounds such as molasses, or other byproducts of sugar refining. It may also be advantageous to add mixtures of various carbon sources. Other possible carbon sources are oils and fats such as, for example, soybean oil, sunflower oil, peanut oil and/or coconut fat, fatty acids such as, for example, palmitic acid, stearic acid and/or linoleic acid, alcohols and/or polyalcohols such as, for example, glycerol, methanol and/or ethanol and/or organic acids such as, for example, acetic acid and/or lactic acid. Nitrogen sources are usually organic or inorganic nitrogen compounds or materials, which contain these compounds. Examples of nitrogen sources include ammonia in liquid or gaseous form or ammonium salts such as ammonium sulfate, ammonium chloride, ammonium phosphate, ammonium carbonate or ammonium nitrate, nitrates, urea, amino acids or complex nitrogen sources such as corn steep liquor, soybean meal, soybean protein, yeast extract, meat extract and others. The nitrogen sources may be used singly or as a mixture. Inorganic salt compounds, which may be present in the media include the chloride, phosphorus or sulfate salts of calcium, magnesium, sodium, cobalt, molybdenum, potassium, manganese, zinc, copper and iron. For preparing sulfur-containing fine chemicals, in particular methionine, it is possible to use as sulfur source inorganic sulfur-containing compounds such as, for example, sulfates, sulfites, dithionites, tetrathionates, thiosulfates, sulfides or else organic sulfur compounds such as mercaptans and thiols. It is possible to use as phosphorus source phosphoric acid, potassium dihydrogenphosphate or dipotassium hydrogenphosphate or the corresponding sodium-containing salts. Chelating agents can be added to the medium in order to keep the metal ions in solution. Particularly suitable chelating agents include dihydroxyphenols such as catechol or protocatechuate, or organic acids such as citric acid. The fermentation media employed according to the invention for cultivating microorganisms normally also contain other growth factors such as vitamins or growth promoters, which include, for example, biotin, riboflavin, thiamine, folic acid, nicotinic acid, pantothenate and pyridoxine. Growth factors and salts are often derived from complex media components such as yeast extract, molasses, corn steep liquor and the like. Suitable precursors can moreover be added to the culture medium. The exact composition of the media compounds depends greatly on the particular experiment and is chosen individually for each specific case. Information about media optimization is obtainable from the textbook “Applied Microbiol. Physiology, A Practical Approach” (editors P. M. Rhodes, P. F. Stanbury, IRL Press (1997) pp. 53-73, ISBN 0 19 963577 3). Growth media can also be purchased from commercial suppliers such as Standard 1 (Merck) or BHI (Brain heart infusion, DIFCO) and the like. All media components are sterilized either by heat (1.5 bar and 121° C. for 20 min) or by sterilizing filtration. The components can be sterilized either together or, if necessary, separately. All media components can be present at the start of the cultivation or optionally be added continuously or batchwise. The temperature of the culture is normally between 15° C. and 45° C., preferably at 25° C. to 40° C., and can be kept constant or changed during the experiment. The pH of the medium should be in the range from 5 to 8.5, preferably around 7. The pH for the cultivation can be controlled during the cultivation by adding basic compounds such as sodium hydroxide, potassium hydroxide, ammonia or aqueous ammonia or acidic compounds such as phosphoric acid or sulfuric acid. Foaming can be controlled by employing antifoams such as, for example, fatty acid polyglycol esters. The stability of plasmids can be maintained by adding to the medium suitable substances having a selective effect, for example antibiotics. Aerobic conditions are maintained by introducing oxygen or oxygen-containing gas mixtures such as, for example, ambient air into the culture. The temperature of the culture is normally from 20° C. to 45° C. and preferably from 25° C. to 40° C. The culture is continued until formation of the desired product is at a maximum. This aim is normally achieved within 10 hours to 160 hours. The fermentation broths obtained in this way, containing in particular L-methionine, L-threonine and/or L-lysine, normally have a dry matter content of from 7.5 to 25% by weight. Sugar-limited fermentation is additionally advantageous, at least at the end, but especially over at least 30% of the fermentation time. This means that the concentration of utilizable sugar in the fermentation medium is kept at, or reduced to, ≧0 to 3g/l during this time. The fermentation broth is then processed further. Depending on requirements, the biomass can be removed entirely or partly by separation methods, such as, for example, centrifugation, filtration, decantation or a combination of these methods, from the fermentation broth or left completely in it. The fermentation broth can then be thickened or concentrated by known methods, such as, for example, with the aid of a rotary evaporator, thin-film evaporator, falling film evaporator, by reverse osmosis or by nanofiltration. This concentrated fermentation broth can then be worked up by freeze-drying, spray drying, spray granulation or by other processes.

[0489] However, it is also possible to purify the amino acid produced further. For this purpose, the product-containing composition is subjected to a chromatography on a suitable resin, in which case the desired product or the impurities are retained wholly or partly on the chromatography resin. These chromatography steps can be repeated if necessary, using the same or different chromatography resins. The skilled worker is familiar with the choice of suitable chromatography resins and their most effective use. The purified product can be concentrated by filtration or ultrafiltration and stored at a temperature at which the stability of the product is a maximum.

[0490] The identity and purity of the isolated compound(s) can be determined by prior art techniques. These include high performance liquid chromatography (HPLC), spectroscopic methods, mass spectrometry (MS), staining methods, thin-layer chromatography, NIRS, enzyme assay or microbiological assays. These analytical methods are summarized in: Patek et al. (1994) Appl. Environ. Microbiol. 60:133-140; Malakhova et al. (1996) Biotekhnologiya 11 27-32; and Schmidt et al. (1998) Bioprocess Engineer. 19:67-70. Ulmann's Encyclopedia of Industrial Chemistry (1996) Vol. A27, VCH: Weinheim, pp. 89-90, pp. 521-540, pp. 540-547, pp. 559-566, 575-581 and pp. 581-587; Michal, G (1999) Biochemical Pathways: An Atlas of Biochemistry and Molecular Biology, John Wiley and Sons; Fallon, A. et al. (1987) Applications of HPLC in Biochemistry in: Laboratory Techniques in Biochemistry and Molecular Biology, Vol. 17.

[0491] In yet another aspect, the invention also relates to harvestable parts and to propagation material of the transgenic plants according to the invention which either contain transgenic plant cells expressing a nucleic acid molecule according to the invention or which contains cells which show an reduced, decreased or deleted cellular activity of the polypeptide of the invention, e.g. a decreased expression level or lower activity of the described protein.

[0492] Harvestable parts can be in principle any useful parts of a plant, for example, flowers, pollen, seedlings, tubers, leaves, stems, fruit, seeds, roots etc. Propagation material includes, for example, seeds, fruits, cuttings, seedlings, tubers, rootstocks etc. Preferred are seeds, seedlings, tubers or fruits as harvestable or propagation material.

[0493] The invention furthermore relates to the use of the transgenic organisms according to the invention and of the cells, cell cultures, parts—such as, for example, roots, leaves and the like as mentioned above in the case of transgenic plant organisms—derived from them, and to transgenic propagation material such as seeds or fruits and the like as mentioned above, for the production of foodstuffs or feeding stuffs, pharmaceuticals or fine chemicals.

[0494] Accordingly in another embodiment, the present invention relates to the use of the nucleic acid molecule, the organism, e.g. the microorganism, the plant, plant cell or plant tissue, the vector, or the polypeptide of the present invention for making the fine chemical. Fine chemicals in the sense of the inventions are for example fatty acids, carotenoids, isoprenoids, vitamins, lipids, wax esters, (poly)saccharides and/or polyhydroxyalkanoates, and/or its metabolism products, in particular, steroid hormones, cholesterol, prostaglandin, triacylglycerols, bile acids and/or ketone bodies, which are produced in cells, tissues and/or plants. There are a number of mechanisms by which the yield, production, and/or efficiency of production of fatty acids, carotenoids, isoprenoids, vitamins, wax esters, lipids, (poly)saccharides and/or polyhydroxyalkanoates, and/or its metabolism products, in particular, steroid hormones, cholesterol, triacylglycerols, prostaglandin, bile acids and/or ketone bodies or further of above defined fine chemicals incorporating such an altered protein can be affected. In the case of plants, by e.g. increasing the expression of acetyl-CoA which is the basis for many products, e.g., fatty acids, carotenoids, isoprenoids, vitamines, lipids, (poly)saccharides, wax esters, and/or polyhydroxyalkanoates, and/or its metabolism products, in particular, prostaglandin, steroid hormones, cholesterol, triacylglycerols, bile acids and/or ketone bodies in a cell, it may be possible to increase the amount of the produced said compounds thus permitting greater ease of harvesting and purification or in case of plants more efficient partitioning. Further, one or more of said metabolism products, increased amounts of the cofactors, precursor molecules, and intermediate compounds for the appropriate biosynthetic pathways may be required. Therefore, by increasing the number and/or activity of transporter proteins involved in the import of nutrients, such as carbon sources (i.e., sugars), nitrogen sources (i.e., amino acids, ammonium salts), phosphate, and sulfur, it may be possible to improve the production of acetyl CoA and its metabolism products as mentioned above, due to the removal of any nutrient supply limitations on the biosynthetic process. In particular, it may be possible to increase the yield, production, and/or efficiency of production of said compounds, e.g. fatty acids, carotenoids, isoprenoids, vitamins, was esters, lipids, (poly)saccharides, and/or polyhydroxyalkanoates, and/or its metabolism products, in particular, steroid hormones, cholesterol, prostaglandin, triacylglycerols, bile acids and/or ketone bodies molecules etc. in plants.

[0495] Furthermore preferred is a method for the recombinant production of pharmaceuticals or fine chemicals in host organisms, wherein a host organism is transformed with one of the above-described nucleic acid constructs comprising one or more structural genes which encode the desired fine chemical or catalyze the biosynthesis of the desired fine chemical, the transformed host organism is cultured, and the desired fine chemical is isolated from the culture medium. This method can be applied widely to fine chemicals such as enzymes, vitamins, amino acids, sugars, fatty acids, and natural and synthetic flavorings, aroma substances and colorants or compositions comprising these. Especially preferred is the additional production of further amino acids, tocopherols and tocotrienols and carotenoids or compositions comprising said compounds. The transformed host organisms are cultured and the products are recovered from the host organisms or the culture medium by methods known to the skilled worker or the organism itself servers as food or feed supplement. The production of pharmaceuticals such as, for example, antibodies or vaccines, is described by Hood E E, Jilka J M. Curr Opin Biotechnol. 1999 August; 10(4):382-6; Ma J K, Vine N D. Curr Top Microbiol Immunol. 1999; 236:275-92.

[0496] Another embodiment of the invention is a double-stranded RNA molecule (dsRNA), whereby the sense strand of said double-stranded RNA nucleic acid molecule has a homology of at least 30%, 35%, 40%, 45%, 50%, 55% or 60%, preferably 65%, 70%, 75% or 80%, more preferably 85%, 90%, 95%, 96%, 97%, 98% or 99% to the nucleic acid molecule of the invention or encoding a protein conferring the expression of a protein having the biological activity of the protein of the invention or comprising a fragment of at least 10 base pairs (=bases, nt, nucleotides), preferably at least 17, 18, 19, 20, 21, 22, 23, 24, 25, 26, 27, 28, 29, 30, 35, 40, 45 or 50, especially preferably at least 40, 50, 60, 70, 80 or 90 base pairs, very especially preferably at least 100, 200, 300 or 400 base pairs, most preferably at least 500, 600, 700, 800, 900 or more base pairs or at least 1000 or 2000 base pairs of a nucleic acid molecule with a homology of at least 50%, 60%, 70%, 80% or 90%, preferably 100% to a nucleic acid molecule conferring the expression of a protein having the biological activity of the protein of the invention or to the nucleic acid molecule of the invention.

[0497] In another preferred embodiment of the invention the encoded sequence or its part-segment amounts to 17, 18, 19, 20, 21, 22, 23, 24, 25, 26 or 27 bases, preferably to 20, 21, 22, 23, 24 or 25 bases, whereby the homology of the sequence is similar to the aforementioned homologies.

[0498] In a preferred embodiment of the invention the sense and antisense strand of the double-stranded RNA are covalently bound or are bound by weak chemical bonds such as hydrogen bonds to each other and the antisense strand is essentially the complement of the sense-RNA strand.

[0499] Yet another embodiment of the invention is an antisense nucleic acid molecule, whereby the antisense nucleic acid molecule has a homology of at least 30% to a nucleic acid molecule antisense to a nucleic acid molecule encoding the protein encoded by the nucleic acid molecule of the invention or the nucleic acid molecule of the invention or encoding the protein of the invention and conferring the expression of a protein having the biological activity of a protein having the biological activity of the protein of the invention or an antisense nucleic acid molecule comprising a fragment of at least 15, 16, 17, 18, 19, 20, 21, 22, 23, 24, 25, 26, 27, 28, 29, 30, 35, 40, 45 or 50, especially preferably at least 60, 70, 80 or 90 base pairs, very especially preferably at least 100, 200, 300 or 400 base pairs, most preferably at least 500, 600, 700, 800, 900 or more base pairs or at least the entire sequence of a nucleic acid molecule with a homology of at least 50% 60%, 70%, 80% or 90%, preferably 100% to an antisense nucleic acid molecule to a nucleic acid molecule conferring the expression of a protein having the biological activity of the protein of the invention or to the nucleic acid molecule of the invention itself or to a nucleic acid encoding the protein of the invention.

[0500] A further embodiment of the invention is a ribozyme, which specifically cleaves a nucleic acid molecule conferring expression of a protein having the biological activity of the protein of the invention or a nucleic acid molecule encoding the protein encoded by the nucleic acid molecule of the invention or the nucleic acid molecule of the invention itself.

[0501] A further embodiment of the invention is an antibody, which specifically binds to and therefore inhibits proteins encoded nucleic acid molecule conferring expression of a protein having the biological activity of the protein of the invention or a nucleic acid molecule encoding the protein encoded by the nucleic acid molecule of the invention or the nucleic acid molecule of the invention itself.

[0502] Yet another embodiments of the invention are a viral nucleic acid molecule conferring the decline of a RNA molecule conferring the expression of a protein having the biological activity of the protein of the invention or of a nucleic acid molecule encoding the protein encoded by the nucleic acid molecule of the invention or of the nucleic acid molecule of the invention or a dominant-negative mutant of the protein of the invention or a nucleic acid molecule encoding such a dominant-negative mutant.

[0503] In one embodiment, the present invention relates to a method for the identification of a gene product conferring an increase in the fine chemical production in a cell of an organism for example a microorganism, a non-human animal or plant, comprising the following steps:
[0504] (a) contacting e.g. hybridising, the nucleic acid molecules of a sample, e.g. cells, tissues, plants or microorganisms or a nucleic acid library, which can contain a candidate gene encoding a gene product conferring an increase in the fine chemical after reduction or deletion of its expression, with the nucleic acid molecule of the present invention;
[0505] (b) identifying the nucleic acid molecules, which hybridize under relaxed stringent conditions with the nucleic acid molecule of the present invention in particular to the nucleic acid molecule sequence shown in SEQ ID NO: 1, SEQ ID NO: 3, SEQ ID NO: 5, SEQ ID NO: 7, SEQ ID NO: 9, SEQ ID NO: 11, SEQ ID NO: 13, SEQ ID NO: 15, SEQ ID NO: 19, SEQ ID NO: 21, SEQ ID NO: 23, SEQ ID NO: 25, SEQ ID NO: 27, SEQ ID NO: 29, SEQ ID NO: 31; SEQ ID NO: 64, SEQ ID NO: 66, SEQ ID NO: 68, SEQ ID NO: 70, SEQ ID NO: 72, SEQ ID NO: 74, SEQ ID NO: 76, SEQ ID NO: 78, SEQ ID NO: 80, SEQ ID NO: 82, SEQ ID NO: 84, SEQ ID NO: 86, SEQ ID NO: 88, SEQ ID NO: 90, SEQ ID NO: 92, SEQ ID NO: 94, SEQ ID NO: 96, SEQ ID NO: 98, SEQ ID NO: 100, SEQ ID NO: 102, SEQ ID NO: 104, SEQ ID NO: 106, SEQ ID NO: 108, SEQ ID NO: 110, SEQ ID NO: 112, SEQ ID NO: 114, SEQ ID NO: 116, SEQ ID NO: 118, SEQ ID NO: 120, SEQ ID NO: 122, SEQ ID NO: 124, SEQ ID NO: 126, SEQ ID NO: 128, SEQ ID NO: 130, SEQ ID NO: 132, SEQ ID NO: 134, SEQ ID NO: 136, SEQ ID NO: 138, SEQ ID NO: 140, SEQ ID NO: , SEQ ID NO: 142, SEQ ID NO: 151, SEQ ID NO: 153, SEQ ID NO: 155, SEQ ID NO: 157, SEQ ID NO: 159, SEQ ID NO: 161, SEQ ID NO: 163, SEQ ID NO: 165, SEQ ID NO: 167, SEQ ID NO: 169, SEQ ID NO: 171, SEQ ID NO: 173, SEQ ID NO: 175, SEQ ID NO: 177, SEQ ID NO: 179, SEQ ID NO: 181, SEQ ID NO: 183, SEQ ID NO: 185, SEQ ID NO: 187, SEQ ID NO: 189, SEQ ID NO: 191, SEQ ID NO: 193, SEQ ID NO: 195, SEQ ID NO: 197, SEQ ID NO: 199, SEQ ID NO: 201, SEQ ID NO: 203, SEQ ID NO: 205, SEQ ID NO: 207, SEQ ID NO: 209, SEQ ID NO: 211, SEQ ID NO: 213, SEQ ID NO: 215, SEQ ID NO: 217, SEQ ID NO: 219, SEQ ID NO: 228, SEQ ID NO: 230, SEQ ID NO: 232, SEQ ID NO: 234, SEQ ID NO: 236, SEQ ID NO: 238, SEQ ID NO: 240, SEQ ID NO: 242, SEQ ID NO: 249, SEQ ID NO: 251, SEQ ID NO: 253, SEQ ID NO: 255, SEQ ID NO: 257, SEQ ID NO: 259, SEQ ID NO: 261, SEQ ID NO: 263, SEQ ID NO: 265, SEQ ID NO: 267, SEQ ID NO: 269, SEQ ID NO: 271, SEQ ID NO: 282, SEQ ID NO: 284, SEQ ID NO: 286, SEQ ID NO: 288, SEQ ID NO: 290, SEQ ID NO: 292, SEQ ID NO: 294, SEQ ID NO: 296, SEQ ID NO: 298, SEQ ID NO: 300, SEQ ID NO: 302, SEQ ID NO: 304, SEQ ID NO: 306, SEQ ID NO: 308, SEQ ID NO: 310, SEQ ID NO: 312, SEQ ID NO: 314, SEQ ID NO: 316, SEQ ID NO: 318, SEQ ID NO: 320, SEQ ID NO: 322, SEQ ID NO: 324, SEQ ID NO: 326, SEQ ID NO: 328, SEQ ID NO: 330, SEQ ID NO: 332, SEQ ID NO: 334, SEQ ID NO: 336, SEQ ID NO: 338, SEQ ID NO: 340, SEQ ID NO: 342, SEQ ID NO: 344, SEQ ID NO: 346, SEQ ID NO: 348, SEQ ID NO: 350, SEQ ID NO: 352, SEQ ID NO: 354, SEQ ID NO: 356, SEQ ID NO: 358, SEQ ID NO: 360, SEQ ID NO: 362, SEQ ID NO: 364, SEQ ID NO: 366, SEQ ID NO: 368, SEQ ID NO: 370, SEQ ID NO: 372, SEQ ID NO: 374, SEQ ID NO: 376, SEQ ID NO: 378, SEQ ID NO: 380, SEQ ID NO: 382, SEQ ID NO: 384, SEQ ID NO: 386, SEQ ID NO: 388, SEQ ID NO: 390, SEQ ID NO: 392, SEQ ID NO: 394, SEQ ID NO: 396, SEQ ID NO: 398, SEQ ID NO: 400, SEQ ID NO: 402, SEQ ID NO: 404, SEQ ID NO: 406, SEQ ID NO: 408, SEQ ID NO: 410, SEQ ID NO: 412, SEQ ID NO: 414, SEQ ID NO: 416, SEQ ID NO: 418, SEQ ID NO: 420, SEQ ID NO: 422, SEQ ID NO: 424, SEQ ID NO: 426, SEQ ID NO: 428, SEQ ID NO: 430, SEQ ID NO: 432, SEQ ID NO: 434 or SEQ ID NO: 440 and, optionally, isolating the full length cDNA clone or complete genomic clone;
[0506] (c) introducing the candidate nucleic acid molecules in host cells, preferably in a plant cell or a microorganism, appropriate for producing the fine chemical
[0507] (d) reducing or deletion the expressing of the identified nucleic acid molecules in the host cells;
[0508] (e) assaying the fine chemical level in the host cells; and
[0509] (f) identifying the nucleic acid molecule and its gene product which reduction or deletion of expression confers an increase in the fine chemical level in the host cell after expression compared to the wild type.

[0510] Relaxed hybridisation conditions are: After standard hybridisation procedures washing steps can be performed at low to medium stringency conditions usually with washing conditions of 40°-55° C. and salt conditions between 2×SSC and 0.2×SSC with 0.1% SDS in comparison to stringent washing conditions as e.g. 60° to 68° C. with 0.1% SDS. Further examples can be found in the references listed above for the stringed hybridization conditions. Usually washing steps are repeated with increasing stringency and length until a useful signal to noise ratio is detected and depend on many factors as the target, e.g. its purity, GC-content, size etc, the probe, e.g. its length, is it a RNA or a DNA probe, salt conditions, washing or hybridisation temperature, washing or hybridisation time etc.

[0511] In another embodiment, the present invention relates to a method for the identification of a gene product the reduction of which conferring an increased production of the fine chemical in a cell, comprising the following steps:
[0512] (a) identifying nucleic acid molecules of an organism; which can contain a candidate gene encoding a gene product conferring an increase in the fine chemical after reduction or deletion of its expression, which are at least 20%, preferably 25%, more preferably 30%, even more preferred are 35%. 40% or 50%, even more preferred are 60%, 70% or 80%, most preferred are 90% or 95% or more homolog to the nucleic acid molecule of the present invention, for example via homology search in a data bank;
[0513] (b) reducing or deleting the expression of the identified nucleic acid molecules in the host cells;
[0514] (c) assaying the fine chemical level in the host cells; and
[0515] (d) identifying the nucleic acid molecule and its gene product which reduction or deletion of expression confers an increase in the fine chemical level in the host cell compared to the wild type

[0516] The nucleic acid molecules identified can then be used for the production of the fine chemical in the same way as the nucleic acid molecule of the present invention. Accordingly, in one embodiment, the present invention relates to a process for the production of the fine chemical, comprising (a) identifying a nucleic acid molecule according to aforementioned steps (a) to (d) and recovering the free or bound compound of the invention from a organism having an decreased cellular activity of a polypeptide encoded by the isolated nucleic acid molecule compared to a wild type.

[0517] Furthermore, in one embodiment, the present invention relates to a method for the identification of a compound stimulating the fine chemical production to said plant comprising:
[0518] a) contacting cells which express the polypeptide of the present invention or its mRNA with a candidate compound under cell cultivation conditions;
[0519] b) assaying a reduction, decrease or deletion in expression of said polypeptide or said mRNA;
[0520] c) comparing the expression level to a standard response made in the absence of said candidate compound; whereby, a reduced, decreased or deleted expression over the standard indicates that the compound is stimulating the fine chemical production.

[0521] Furthermore, in one embodiment, the present invention relates to a method for the screening for antagonists of the activity of the polypeptide of the present invention, e.g. a polypeptide conferring an increase of the fine chemical in an organism or a part thereof after decreasing the cellular activity, e.g. of the activity of a polypeptide having the biological activity represented by the protein of the invention comprising:
[0522] (a) contacting cells, tissues, plants or microorganisms which express the polypeptide according to the invention with a candidate compound or a sample comprising a plurality of compounds under conditions which permit the expression the polypeptide of the present invention;
[0523] (b) assaying the fine chemical level or the polypeptide expression level in the cell, tissue, plant or microorganism or the media the cell, tissue, plant or microorganisms is cultured or maintained in; and
[0524] (c) identifying an antagonist by comparing the measured fine chemical level or polypeptide expression level with a standard fine chemical or polypeptide expression level measured in the absence of said candidate compound or a sample comprising said plurality of compounds, whereby an increased level of the fine chemical over the standard indicates that the compound or the sample comprising said plurality of compounds is an antagonist.

[0525] Yet another embodiment of the invention relates to a process for the identification of a compound conferring increased fine chemical production in a plant; non-human animal or microorganism, comprising the following step:
[0526] a. culturing or maintaining a plant or animal cell or their tissues or microorganism expressing the polypeptide of the invention or a polynucleotide encoding said polypeptide and a readout system capable of interacting with the polypeptide under suitable conditions which permit the interaction of the polypeptide with this readout system in the presence of a chemical compound or a sample comprising a plurality of chemical compounds and capable of providing a detectable signal in response to the binding of a chemical compound to said polypeptide under conditions which permit the depression of said readout system and of the protein of the invention; and
[0527] b. identifying if the chemical compound is an effective antagonist by detecting the presence or absence or decrease or increase of a signal produced by said readout system.

[0528] Said compound may be chemically synthesized or microbiologically produced and/or comprised in, for example, samples, e.g., cell extracts from, e.g., plants, animals or microorganisms, e.g. pathogens. Furthermore, said compound(s) may be known in the art but hitherto not known to be capable of suppressing the polypeptide of the present invention. The reaction mixture may be a cell free extract or may comprise a cell or tissue culture. Suitable set ups for the method of the invention are known to the person skilled in the art and are, for example, generally described in Alberts et al., Molecular Biology of the Cell, third edition (1994), in particular Chapter 17. The compounds may be, e.g., added to the reaction mixture, culture medium, injected into the cell or sprayed onto the plant.

[0529] If a sample containing a compound is identified in the method of the invention, then it is either possible to isolate the compound from the original sample identified as containing the compound capable of activating or increasing the content of the fine chemical in an organism or part thereof, or one can further subdivide the original sample, for example, if it consists of a plurality of different compounds, so as to reduce the number of different substances per sample and repeat the method with the subdivisions of the original sample. Depending on the complexity of the samples, the steps described above can be performed several times, preferably until the sample identified according to the method of the invention only comprises a limited number of or only one substance(s). Preferably said sample comprises substances of similar chemical and/or physical properties, and most preferably said substances are identical. Preferably, the compound identified according to the described method above or its derivative is further formulated in a form suitable for the application in plant breeding or plant cell and tissue culture.

[0530] The compounds which can be tested and identified according to a method of the invention may be expression libraries, e.g., cDNA expression libraries, peptides, proteins, nucleic acids, antibodies, small organic compounds, hormones, peptidomimetics, PNAs or the like (Milner, Nature Medicine 1 (1995), 879-880; Hupp, Cell 83 (1995), 237-245; Gibbs, Cell 79 (1994), 193-198 and references cited supra). Said compounds can also be functional derivatives or analogues of known inhibitors or activators. Methods for the preparation of chemical derivatives and analogues are well known to those skilled in the art and are described in, for example, Beilstein, Handbook of Organic Chemistry, Springer edition New York Inc., 175 Fifth Avenue, New York, N.Y. 10010 U.S.A. and Organic Synthesis, Wiley, New York, USA. Furthermore, said derivatives and analogues can be tested for their effects according to methods known in the art. Furthermore, peptidomimetics and/or computer aided design of appropriate derivatives and analogues can be used, for example, according to the methods described above. The cell or tissue that may be employed in the method of the invention preferably is a host cell, plant cell or plant tissue of the invention described in the embodiments hereinbefore.

[0531] Thus, in a further embodiment the invention relates to a compound obtained or identified according to the method for identifying an antagonist of the invention said compound being an antagonist of the polypeptide of the present invention.

[0532] Accordingly, in one embodiment, the present invention further relates to a compound identified by the method for identifying a compound of the present invention.

[0533] Said compound is, for example, a homolog of the polypeptide of the present invention. Homologues of the polypeptide of the present invention can be generated by mutagenesis, e.g., discrete point mutation or truncation of the polypeptide of the present invention. As used herein, the term “homologue” refers to a variant form of the protein, which acts as an antagonist of the activity of the polypeptide of the present invention. An antagonist of said protein has lost the biological activities of the polypeptide of the present invention. In particular, said antagonist confers a decrease of the expression level of the polypeptide of the present invention and thereby the expression of said antagonist in an organisms or part thereof confers the increase of free and/or bound compound of the invention in the organism or part thereof.

[0534] In one embodiment, the invention relates to an antibody specifically recognizing the compound or antagonist of the present invention.

[0535] The invention also relates to a diagnostic composition comprising at least one of the aforementioned nucleic acid molecules, vectors, proteins, antibodies or compounds of the invention and optionally suitable means for detection.

[0536] The diagnostic composition of the present invention is suitable for the isolation of mRNA from a cell and contacting the mRNA so obtained with a probe comprising a nucleic acid probe as described above under hybridizing conditions, detecting the presence of mRNA hybridized to the probe, and thereby detecting the expression of the protein in the cell. Further methods of detecting the presence of a protein according to the present invention comprise immunotechniques well known in the art, for example enzyme linked immunoabsorbent assay. Furthermore, it is possible to use the nucleic acid molecules according to the invention as molecular markers or primers in plant breeding. Suitable means for detection are well known to a person skilled in the art, e.g. buffers and solutions for hydridization assays, e.g. the aforementioned solutions and buffers, further and means for Southern-, Western-, Northern etc.-blots, as e.g. described in Sambrook et al. are known.

[0537] In another embodiment, the present invention relates to a kit comprising the nucleic acid molecule, the vector, the host cell, the polypeptide, the anti-sense nucleic acid, the antibody, plant cell, the plant or plant tissue, the harvestable part, the propagation material and/or the compound and/or antagonist identified according to the method of the invention.

[0538] The compounds of the kit of the present invention may be packaged in containers such as vials, optionally with/in buffers and/or solution. If appropriate, one or more of said components might be packaged in one and the same container. Additionally or alternatively, one or more of said components might be adsorbed to a solid support as, e.g. a nitrocellulose filter, a glass plate, a chip, or a nylon membrane or to the well of a micro titerplate. The kit can be used for any of the herein described methods and embodiments, e.g. for the production of the host cells, transgenic plants, pharmaceutical compositions, detection of homologous sequences, identification of antagonists or agonists, as food or feed or as a supplement thereof or as supplement for the treating of plants, etc.

[0539] Further, the kit can comprise instructions for the use of the kit for any of said embodiments, in particular for the use for producing organisms or part thereof having an increased free or bound compound of the invention content.

[0540] In one embodiment said kit comprises further a nucleic acid molecule encoding one or more of the aforementioned protein, and/or an antibody, a vector, a host cell, an antisense nucleic acid, a plant cell or plant tissue or a plant.

[0541] In a further embodiment, the present invention relates to a method for the production of a agricultural composition providing the nucleic acid molecule, the vector or the polypeptide of the invention or comprising the steps of the method according to the invention for the identification of said compound or antagonist; and formulating the nucleic acid molecule, the vector or the polypeptide of the invention or the antagonist, or compound identified according to the methods or processes of the present invention or with use of the subject matters of the present invention in a form applicable as plant agricultural composition.

[0542] In another embodiment, the present invention relates to a method for the production of the fine chemical supporting plant culture composition comprising the steps of the method for of the present invention; and formulating the compound identified in a form acceptable as agricultural composition.

[0543] Under “acceptable as agricultural composition” is understood, that such a composition is in agreement with the laws regulating the content of fungicides, plant nutrients, herbicides, etc. Preferably such a composition is without any harm for the protected plants and the animals (humans included) fed therewith.

[0544] The present invention also pertains to several embodiments relating to further uses and methods. The nucleic acid molecule, polypeptide, protein homologues, fusion proteins, primers, vectors, host cells, described herein can be used in one or more of the following methods: identification of plants useful for the fine chemical production as mentioned and related organisms; mapping of genomes; identification and localization of sequences of interest; evolutionary studies; determination of regions required for function; modulation of an activity.

[0545] The nucleic acid molecule of the invention, the vector of the invention or the nucleic acid construct of the invention may also be useful for the production of organisms resistant to inhibitors of the amino acid production biosynthesis pathways. In particular, the reduction, decrease or deletion of the polypeptide of the present invention may protect plants against herbicides, which block the amino acid, in particular the methionine, synthesis in said plant.

[0546] Accordingly, the nucleic acid molecules of the present invention have a variety of uses. First, they may be used to identify an organism or a close relative thereof. Also, they may be used to identify the presence thereof or a relative thereof in a mixed population of microorganisms or plants. By probing the extracted genomic DNA of a culture of a unique or mixed population of plants under stringent conditions with a probe spanning a region of the gene of the present invention which is unique to this, one can ascertain whether the present invention has been used or whether it or a close relative is present.

[0547] Further, the nucleic acid molecule of the invention may be sufficiently homologous to the sequences of related species such that these nucleic acid molecules may serve as markers for the construction of a genomic map in related organism or for association mapping. Furthermore natural variation in the genomic regions corresponding to nucleic acids of the invention or homologous thereof may lead to variation in the activity of the proteins of the invention and their homolgous and in consequence in natural variation in the production of the fine chemical. In consequence natural variation eventually also exists in form of less active allelic variants leading already to a relative increase in the production of the fine chemical. Different variants of the nucleic acids of the invention, which corresponds to different fine chemical production capabilities can be identified and used for marker assisted breeding for increase in the fine chemical.

[0548] Accordingly, the present invention relates to a method for breeding plants for the production of the fine chemical, comprising
[0549] (a) selecting a first plant variety capable to produce the fine chemical by reducing decreasing or deleting the expressing the polypeptide according to invention;
[0550] (b) associating the ability to produce a certain level of the fine chemical with the expression level or the genomic structure of the genes of the invention;
[0551] (c) crossing the first plant variety with a second plant variety, which significantly differs in its ability to produce the fine chemical; and
[0552] (d) identifying, which of the offspring varieties has got the capacity to overproduce the fine chemical by means of analyzing the expression or genomic structure of the genes of the invention.

[0553] The nucleic acid molecules of the invention are also useful for evolutionary and protein structural studies. By comparing the sequences of the invention to those encoding similar enzymes from other organisms, the evolutionary relatedness of the organisms can be assessed. Similarly, such a comparison permits an assessment of which regions of the sequence are conserved and which are not, which may aid in determining those regions of the protein which are essential for the functioning of the enzyme. This type of determination is of value for protein engineering studies and may give an indication of what the protein can tolerate in terms of mutagenesis without losing function.

[0554] Accordingly, the nucleic acid molecule of the invention can be used for the identification of other nucleic acids conferring an increase of the fine chemical after reduction, decrease or deletion of their expression.

[0555] Further, the nucleic acid molecule of the invention or a fragment of a gene conferring the expression of the polypeptide of the invention, preferably comprising the nucleic acid molecule of the invention, can be used for marker assisted breeding or association mapping of the fine chemical derived traits.

[0556] Accordingly, the nucleic acid of the invention, the polypeptide of the invention, the nucleic acid construct of the invention, the organisms, the host cell, the microorganisms, the plant, plant tissue, plant cell, or the part thereof of the invention, the vector of the invention, the antagonist identified with the method of the invention, the nucleic acid molecule identified with the method of the present invention, can be used for the production of the fine chemical or the fine chemical in combination with one or more amino acids, in particular threonine, alanine, homoserine, glutamine, glutamic acid, valine, asparagine, phenylalanine, leucine, isoleucine, proline and/or tryptophane.

[0557] These and other embodiments are disclosed and encompassed by the description and examples of the present invention. Further literature concerning any one of the methods, uses and compounds to be employed in accordance with the present invention may be retrieved from public libraries, using for example electronic devices. For example the public database “Medline” may be utilized which is available on the Internet, for example under http://www.ncbi.nlm.nih.gov/PubMed/medline.html. Further databases and addresses, such as http://www.ncbi.nlm.nih.gov/, http://www.infobiogen.fr/, hftp://www.fmi.ch/biology/research-tools.html, http://www.tigr.org/, are known to the person skilled in the art and can also be obtained using, e.g., http://www.lycos.com. An overview of patent information in biotechnology and a survey of relevant sources of patent information useful for retrospective searching and for current awareness is given in Berks, TIBTECH 12 (1994), 352-364.

[0558] The present invention is illustrated by the examples, which follow. The present examples illustrate the basic invention without being intended as limiting the subject of the invention. The content of all of the references, patent applications, patents and published patent applications cited in the present patent application is herewith incorporated by reference.

### EXAMPLES

### Example 1

### Cloning SEQ ID NO: 1 in Escherichia coli

[0559] SEQ ID NO: 1 can be cloned into the plasmids pBR322 (Sutcliffe, J. G. (1979) Proc. Natl Acad. Sci. USA, 75: 3737-3741); pACYC177 (Change & Cohen (1978) J. Bacteriol. 134: 1141-1156); plasmids of the pBS series (pBSSK+, pBSSK− and others; Stratagene, LaJolla, USA) or cosmids such as SuperCos1 (Stratagene, LaJolla, USA) or Lorist6 (Gibson, T. J. Rosenthal, A., and Waterson, R. H. (1987) Gene 53: 283-286) for expression in E. coli using known, well-established procedures (see, for example, Sambrook, J. et al. (1989) “Molecular Cloning: A Laboratory Manual”. Cold Spring Harbor Laboratory Press or Ausubel, F. M. et al. (1994) “Current Protocols in Molecular Biology”, John Wiley & Sons).

[0560] Unless otherwise specified, standard methods as described in Sambrook et al., Molecular Cloning: A laboratory manual, Cold Spring Harbor 1989, Cold Spring Harbor Laboratory Press are used throughout the examples.

### Example 2

### DNA Sequencing and Computerized Functional Analysis

[0561] The DNA was sequenced by standard procedures, in particular the chain determination method, using ABI377 sequencers (see, for example, Fleischman, R. D. et al. (1995) “Whole-genome Random Sequencing and Assembly of Haemophilus Influenza Rd., Science 269; 496-512)”.

### Example 3

### In-Vivo Mutagenesis

[0562] An in vivo mutagenesis of Corynebacterium glutamicum for the production of amino acids can be carried out by passing a plasmid DNA (or another vector DNA) through E. coli such as E. coli XL-1 red and other microorganisms (for example Bacillus spp. or yeasts such as Saccharomyces cerevisiae), which are not capable of maintaining the integrity of its genetic information. Usual mutator strains have mutations in the genes for the DNA repair system [for example mutHLS, mutD, mutT and the like; for comparison, see Rupp, W. D. (1996) DNA repair mechanisms in Escherichia coli and Salmonella, pp. 2277-2294, ASM: Washington]. These strains are known to the skilled worker. The use of these strains is illustrated for example in Greener, A. and Callahan, M. (1994) Strategies 7; 32-34.

### Example 4

### DNA Transfer Between Escherichia coli and Corynebacterium glutamicum

[0563] Several Corynebacterium and Brevibacterium species comprise endogenous plasmids (such as, for example, pHM1519 or pBL1), which replicate autonomously (for a review, see, for example, Martin, J. F. et al. (1987) Biotechnology 5: 137-146). Shuttle vectors for Escherichia coli and Corynebacterium glutamicum can be constructed easily using standard vectors for E. coli (Sambrook, J. et al., (1989), “Molecular Cloning: A Laboratory Manual”, Cold Spring Harbor Laboratory Press or Ausubel, F. M. et al. (1994) “Current Protocols in Molecular Biology”, John Wiley & Sons), which have a replication origin for, and suitable marker from, Corynebacterium glutamicum added. Such replication origins are preferably taken from endogenous plasmids, which have been isolated from Corynebacterium and Brevibacterium species. Genes, which are used in particular as transformation markers for these species are genes for kanamycin resistance (such as those which originate from the Tn5 or Tn-903 transposon) or for chloramphenicol resistance (Winnacker, E. L. (1987) “From Genes to Clones—Introduction to Gene Technology, VCH, Weinheim). There are many examples in the literature of the preparation of a large multiplicity of shuttle vectors which are replicated in E. coli and C. glutamicum and which can be used for various purposes including the overexpression of genes (see, for example, Yoshihama, M. et al. (1985) J. Bacteriol. 162: 591-597, Martin, J. F. et al., (1987) Biotechnology, 5: 137-146 and Eikmanns, B. J. et al. (1992) Gene 102: 93-98) or the downregulation of genes. Suitable vectors, which replicate in coryneform bacteria are for example, pZ1 (Menkel et al., Appl. Environ. Microbiol. 64, 1989: 549-554) pEkEx1 (Eikmanns et al., Gene 102, 1991: 93-98) or pHS2-1 (Sonnen et al, Gene 107, 1991: 69-74). These vectors are based on the cryptic plasmids pHM1519, pBL1 or pGA1. Other plasmid vectors such as, for example, those based on pCG4 (U.S. Pat. No. 4,489,160), pNG2 (Serwold-Davis et al., FEMS Microbiol. Lett., 66, 1990: 119-124) or pAG1 (U.S. Pat. No. 5,158,891) can be used in the same manner.

[0564] Using standard methods, it is possible to clone a gene of interest into one of the above-described shuttle vectors and to introduce such hybrid vectors into Corynebacterium glutamicum strains. The transformation of C. glutamicum can be achieved by protoplast transformation (Kastsumata, R. et al., (1984) J. Bacteriol. 159, 306-311), electroporation (Liebl, E. et al., (1989) FEMS Microbiol. Letters, 53: 399-303) and in those cases where specific vectors are used also by conjugation (such as, for example, described in Schäfer, A., et al. (1990) J. Bacteriol. 172: 1663-1666). Likewise, it is possible to transfer the shuttle vectors for C. glutamicum to E. coli by preparing plasmid DNA from C. glutamicum (using standard methods known in the art) and transforming it into E. coli. This transformation step can be carried out using standard methods, but preferably using a Mcr-deficient E. coli strain, such as NM522 (Gough & Murray (1983) J. Mol. Biol. 166: 1-19).

[0565] If the transformed sequence(s) is/are to be integrated advantageously into the genome of the coryneform bacteria, standard techniques known to the skilled worker also exist for this purpose. Examples, which are used for this purpose are plasmid vectors as they have been described by Remscheid et al. (Appl. Environ. Microbiol., 60, 1994: 126-132) for the duplication and amplification of the hom-thrB operon. In this method, the complete gene is cloned into a plasmid vector, which is capable of replication in a host such as E. coli, but not in C. glutamicum. Suitable vectors are, for example, pSUP301 (Simon et al., Bio/Technology 1, 1983: 784-791), pKIBmob or pK19mob (Schafer et al., Gene 145, 1994: 69-73), pGEM-T (Promega Corp., Madison, Wis., USA), pCR2.1-TOPO (Schuman, J. Biol. Chem., 269, 1994: 32678-32684, U.S. Pat. No. 5,487,993), pCR®Blunt (Invitrogen, Groningen, the Netherlands) or pEM1 (Schrumpf et al., J. Bacteriol., 173, 1991: 4510-4516).

[0566] Another method to introduce mutations in a target gene is disclosed by Schafer et al. [Gene. 1994 Jul. 22; 145(1):69-73]. Schafer et al. teaches small mobilizable multi-purpose cloning vectors derived from the Escherichia coli plasmids pK18 and pK19 for the selection of defined deletions in the chromosome of Corynebacterium glutamicum.

### Example 5

### Determining the Expression of the Mutant/Transgenic Protein

[0567] The observations of the activity of a mutated, or transgenic, protein in a transformed host cell are based on the fact that the protein is expressed in a modified manner and in therefore for example in lower quantity as the wild-type protein. A suitable method for determining the transcription quantity of the mutant, or transgenic, gene (a sign for the amount of mRNA which is available for the translation of the gene product) is to carry out a Northern blot (see, for example, Ausubel et al., (1988) Current Protocols in Molecular Biology, Wiley: New York), where a primer which is designed in such a way that it binds to the gene of interest is provided with a detectable marker (usually a radioactive or chemiluminescent marker) so that, when the total RNA of a culture of the organism is extracted, separated on a gel, applied to a stable matrix and incubated with this probe, the binding and quantity of the binding of the probe indicates the presence and also the amount of mRNA for this gene. Another method is a quantitative PCR. This information detects the extent to which the gene has been transcribed. Total cell RNA can be isolated from Corynebacterium glutamicum by a variety of methods, which are known in the art, as described in Bormann, E. R. et al., (1992) Mol. Microbiol. 6: 317-326.

[0568] Standard techniques, such as Western blot, may be employed to determine the presence or relative amount of protein translated from this mRNA (see, for example, Ausubel et al. (1988) “Current Protocols in Molecular Biology”, Wiley, New York). In this method, total cell proteins are extracted, separated by gel electrophoresis, transferred to a matrix such as nitrocellulose and incubated with a probe, such as an antibody, which binds specifically to the desired protein. This probe is usually provided directly or indirectly with a chemiluminescent or colorimetric marker, which can be detected readily. The presence and the observed amount of marker indicate the presence and the amount of the sought mutant protein in the cell. However, other methods are also known.

### Example 6

### Growth of Genetically Modified Corynebacterium glutamicum: Media and Culture Conditions

[0569] Genetically modified Corynebacteria are grown in synthetic or natural growth media. A number of different growth media for Corynebacteria are known and widely available (Lieb et al. (1989) Appl. Microbiol. Biotechnol. 32: 205-210; von der Osten et al. (1998) Biotechnology Letters 11: 11-16; Patent DE 4 120 867; Liebl (1992) “The Genus Corynebacterium”, in: The Procaryotes, Vol. II, Balows, A., et al., Ed-Springer-Verlag).

[0570] Said media, which can be used according to the invention usually consist of one or more carbon sources, nitrogen sources, inorganic salts, vitamins and trace elements. Preferred carbon sources are sugars such as mono-, di- or polysaccharides. Examples of very good carbon sources are glucose, fructose, mannose, galactose, ribose, sorbose, ribulose, lactose, maltose, sucrose, raffinose, starch or cellulose. Sugars may also be added to the media via complex compounds such as molasses or other by-products of sugar refining. It may also be advantageous to add mixtures of various carbon sources. Other possible carbon sources are alcohols and/or organic acids such as methanol, ethanol, acetic acid or lactic acid. Nitrogen sources are usually organic or inorganic nitrogen compounds or materials containing said compounds. Examples of nitrogen sources include ammonia gas, aqueous ammonia solutions or ammonium salts such as NH₄Cl, or (NH₄)₂SO₄, NH₄OH, nitrates, urea, amino acids or complex nitrogen sources such as cornsteep liquor, soybean flour, soybean protein, yeast extract, meat extract and others. Mixtures of the above nitrogen sources may be used advantageously.

[0571] Inorganic salt compounds, which may be included in the media comprise the chloride, phosphorus or sulfate salts of calcium, magnesium, sodium, cobalt, molybdenum, potassium, manganese, zinc, copper and iron. Chelating agents may be added to the medium in order to keep the metal ions in solution. Particularly suitable chelating agents include dihydroxyphenols such as catechol or protocatechulate or organic acids such as citric acid. The media usually also contain other growth factors such as vitamins or growth promoters, which include, for example, biotin, riboflavin, thiamine, folic acid, nicotinic acid, panthothenate and pyridoxine. Growth factors and salts are frequently derived from complex media components such as yeast extract, molasses, cornsteep liquor and the like. The exact composition of the compounds used in the media depends heavily on the particular experiment and is decided upon individually for each specific case. Information on the optimization of media can be found in the textbook “Applied Microbiol. Physiology, A Practical Approach” (Ed. P. M. Rhodes, P. F. Stanbury, IRL Press (1997) S. 53-73, ISBN 0 19 963577 3). Growth media can also be obtained from commercial suppliers, for example Standard 1 (Merck) or BHI (Brain heart infusion, DIFCO) and the like.

[0572] All media components are sterilized, either by heat (20 min at 1.5 bar und 121° C.) or by filter sterilization. The components may be sterilized either together or, if required, separately. All media components may be present at the start of the cultivation or added continuously or batchwise, as desired.

[0573] The culture conditions are defined separately for each experiment. The temperature is normally between 15° C. and 45° C. and may be kept constant or may be altered during the experiment. The pH of the medium should be in the range from 5 to 8.5, preferably around 7.0, and can be maintained by adding buffers to the media. An example of a buffer for this purpose is a potassium phosphate buffer. Synthetic buffers such as MOPS, HEPES, ACES and the like may be used as an alternative or simultaneously. The culture pH value may also be kept constant during the culture period by addition of, for example, NaOH or NH₄OH. If complex media components such as yeast extract are used, additional buffers are required less since many complex compounds have a high buffer capacity. When using a fermenter for the culture of microorganisms, the pH value can also be regulated using gaseous ammonia.

[0574] The incubation period is generally in a range of from several hours to several days. This time period is selected in such a way that the maximum amount of product accumulates in the fermentation broth. The growth experiments, which are disclosed, can be carried out in a multiplicity of containers such as microtiter plates, glass tubes, glass flasks or glass or metal fermenters of various sizes. To screen a large number of clones, the microorganisms should be grown in microtiter plates, glass tubes or shake flasks, either using simple flasks or baffle flasks. 100 ml shake flasks filled with 10% (based on the volume) of the growth medium required are preferably used. The flasks should be shaken on an orbital shaker (amplitude 25 mm) at a rate ranging from 100 to 300 rpm. Evaporation lasses can be reduced by maintaining a humid atmosphere; as an alternative, a mathematical correction should be carried out for the evaporation losses.

[0575] If genetically modified clones are examined, an unmodified control clone, or a control clone, which contains the basic plasmid without insertion, should also be included in the tests. If a transgenic sequence is expressed, a control clone should advantageously again be included in these tests. The medium is advantageously inoculated to an OD600 of 0.5 to 1.5 using cells which have been grown on agar plates, such as CM plates (10 g/l glucose, 2.5 g/l NaCl, 2g/l urea, 10 g/l polypeptone, 5 g/l yeast extract, 5 g/1 meat extract, 22g/l agar, pH value 6.8 established with 2M NaOH), which have been incubated at 30° C. The media are inoculated either by introducing a saline solution of C. glutamicum cells from CM plates or by addition of a liquid preculture of this bacterium.

### Example 7

### In-Vitro Analysis of the Function of the Proteins Encoded by the Transformed Sequences

[0576] The determination of the activities and kinetic parameters of enzymes is well known in the art. Experiments for determining the activity of a specific modified enzyme must be adapted to the specific activity of the wild-enzyme type, which is well within the capabilities of the skilled worker. Overviews of enzymes in general and specific details regarding the structure, kinetics, principles, methods, applications and examples for the determination of many enzyme activities can be found for example in the following literature: Dixon, M., and Webb, E. C: (1979) Enzymes, Longmans, London; Fersht (1985) Enzyme Structure and Mechanism, Freeman, N.Y.; Walsh (1979) Enzymatic Reaction Mechanisms. Freeman, San Francisco; Price, N. C., Stevens, L. (1982) Fundamentals of Enzymology. Oxford Univ. Press: Oxford; Boyer, P. D: Ed. (1983) The Enzymes, 3rd Ed. Academic Press, New York; Bisswanger, H. (1994) Enzymkinetik, 2nd Ed. VCH, Weinheim (ISBN 3527300325); Bergmeyer, H. U., Bergmeyer, J., Graβl, M. Ed. (1983-1986) Methods of Enzymatic Analysis, 3^{rd} Ed. Vol. I-XII, Verlag Chemie: Weinheim; and Ullmann's Encyclopedia of Industrial Chemistry (1987) Vol. A9, “Enzymes”, VCH, Weinheim, pp. 352-363.

### Example 8

### Analysis of the Effect of the Nucleic Acid Molecule on the Production of the Amino Acids

[0577] The effect of the genetic modification in C. glutamicum on the production of an amino acid can be determined by growing the modified microorganisms under suitable conditions (such as those described above) and analyzing the medium and/or the cellular components for the increased production of the amino acid. Such analytical techniques are well known to the skilled worker and encompass spectroscopy, thin-layer chromatography, various types of staining methods, enzymatic and microbiological methods and analytical chromatography such as high-performance liquid chromatography (see, for example, Ullman, Encyclopedia of Industrial Chemistry, Vol. A2, pp. 89-90 and pp. 443-613, VCH: Weinheim (1985); Fallon, A., et al., (1987) “Applications of HPLC in Biochemistry” in: Laboratory Techniques in Biochemistry and Molecular Biology, Vol. 17; Rehm et al. (1993) Biotechnology, Vol. 3, Chapter III: “Product recovery and purification”, pp. 469-714, VCH: Weinheim; Belter, P. A. et al. (1988) Bioseparations: downstream processing for Biotechnology, John Wiley and Sons; Kennedy, J. F. and Cabral, J. M. S. (1992) Recovery processes for biological Materials, John Wiley and Sons; Shaeivitz, J. A. and Henry, J. D. (1988) Biochemical Separations, in Ullmann's Encyclopedia of Industrial Chemistry, Vol. B3; chapter 11, pp. 1-27, VCH: Weinheim; and Dechow, F. J. (1989) Separation and purification techniques in biotechnology, Noyes Publications).

[0578] In addition to the determination of the fermentation end product, other components of the metabolic pathways which are used for the production of the desired compound, such as intermediates and by-products, may also be analyzed in order to determine the total productivity of the organism, the yield and/or production efficiency of the compound. The analytical methods encompass determining the amounts of nutrients in the medium (for example sugars, hydrocarbons, nitrogen sources, phosphate and other ions), determining biomass composition and growth, analyzing the production of ordinary metabolites from biosynthetic pathways and measuring gases generated during the fermentation. Standard methods for these are described in Applied Microbial Physiology; A Practical Approach, P. M. Rhodes and P. F. Stanbury, Ed. IRL Press, pp. 103-129; 131-163 and 165-192 (ISBN: 0199635773) and the references cited therein.

### Example 9

### Purification of the Amino Acid

[0579] The amino acid can be recovered from cells or from the supernatant of the above-described culture by a variety of methods known in the art. For example, the culture supernatant is recovered first. To this end, the cells are harvested from the culture by slow centrifugation. Cells can generally be disrupted or lysed by standard techniques such as mechanical force or sonication. The cell debris is removed by centrifugation and the supernatant fraction, if appropriate together with the culture supernatant, is used for the further purification of the amino acid. However, it is also possible to process the supernatant alone if the amino acid is present in the supernatant in sufficiently high a concentration. In this case, the amino acid, or the amino acid mixture, can be purified further for example via extraction and/or salt precipitation or via ion-exchange chromatography.

[0580] If required and desired, further chromatography steps with a suitable resin may follow, the amino acid, but not many contaminants in the sample, being retained on the chromatography resin or the contaminants, but not the sample with the product (amino acid), being retained on the resin. If necessary, these chromatography steps may be repeated, using identical or other chromatography resins. The skilled worker is familiar with the selection of suitable chromatography resin and the most effective use for a particular molecule to be purified. The purified product can be concentrated by filtration or ultrafiltration and stored at a temperature at which maximum product stability is ensured. Many purification methods, which are not limited to the above purification method are known in the art. They are described, for example, in Bailey, J. E. & Ollis, D. F. Biochemical Engineering Fundamentals, McGraw-Hill: New York (1986).

[0581] Identity and purity of the amino acid isolated can be determined by standard techniques of the art. They encompass high-performance liquid chromatography (HPLC), spectroscopic methods, mass spectrometry (MS), staining methods, thin-layer chromatography, NIRS, enzyme assay or microbiological assays. These analytical methods are compiled in: Patek et al. (1994) Appl. Environ. Microbiol. 60: 133-140; Malakhova et al. (1996) Biotekhnologiya 11: 27-32; and Schmidt et al. (1998) Bioprocess Engineer. 19: 67-70. Ulmann's Encyclopedia of Industrial Chemistry (1996) Vol. A27, VCH: Weinheim, pp. 89-90, pp. 521-540, pp. 540-547, pp. 559-566, 575-581 and pp. 581-587; Michal, G (1999) Biochemical Pathways: An Atlas of Biochemistry and Molecular Biology, John Wiley and Sons; Fallon, A. et al. (1987) Applications of HPLC in Biochemistry in: Laboratory Techniques in Biochemistry and Molecular Biology, Vol. 17.

### Example 10

### Engineering of Arabidopsis Plants by Inactivation or Down-Regulation of Genes

[0582] A binary knock out vector was constructed based on the modified pPZP binary vector backbone (comprising the kanamycin-gene for bacterial selection; Hajdukiewicz, P. et al., 1994, Plant Mol. Biol., 25: 999-994) and the selection marker bar-gene (De Block et al., 1987, EMBO J. 6, 2513-2518) driven by the mas2′1′ and mas271f promoters (Velten et al., 1984, EMBO J. 3, 2723-2730; Mengiste, Amedeo and Paszkowski, 1997, Plant J., 12, 945-948).

[0583] Examples of other usable binary vectors for insertional mutagenesis are pBIN19, pB101, pBinAR, pSun or pGPTV. An overview over binary vectors and their specific features is given in Hellens et al., 2000, Trends in plant Science, 5:446-451 and in Guerineau F., Mullineaux P., 1993, Plant transformation and expression vectors in plant molecular biology, LABFAX Series, (Croy R. R. D., ed.) pp. 121-127 Bios Scientific Publishers, Oxford.

[0584] Transformation of Agrobacteria

[0585] The plasmid was transformed into Agrobacterium tumefaciens (GV3101pMP90; Koncz and Schell, 1986 Mol. Gen. Genet. 204:383-396) using heat shock or electroporation protocols. Transformed colonies were grown on YEB medium and selected by respective antibiotics (Rif/Gent/Km) for 2 d at 28° C. These agrobacteria cultures were used for the plant transformation.

[0586] Arabidopsis thaliana of the ecotype C24 were grown and transformed according to standard conditions (Bechtold, N., Ellis, J., Pelletier, G. 1993. In planta Agrobacterium mediated gene transfer by infiltration of Arabidopsis thaliana plants, C.R. Acad. Sci. Paris 316:1194-1199; Bent, A. F., Clough, J. C., 1998; Floral dip: a simplified method for Agrobacterium-mediated transformation of Arabidopsis thaliana, PLANT J. 16:735-743).

[0587] Transformed plants (F1) were selected by the use of their respective resistance marker. In case of BASTA®-resistance, plantlets were sprayed four times at an interval of 2 to 3 days with 0.02% BASTA® and transformed plants were allowed to set seeds. 50-100 seedlings (F2) were subjected again to marker selection, in case of BASTA-resistance by spaying with 0.1% BASTA® on 4 consecutive days during the plantlet phase. Plants segregating for a single resistance locus (approximately 3:1 resistant seedling to sensitive seedlings) were chosen for further analysis. From these lines three of the resistant seedlings (F2) were again allowed to set seeds and were tested for homozygosis through in-vitro germination of their seeds (F3) on agar medium containing the selection agent (BASTA®, 15 mg/L ammonium glufosinate, Pestanal, Riedel de Haen, Seeize, Germany). Those F2 lines which showed nearly 100% resistant offspring (F3) were considered homozygote and taken for functional analysis.

### Example 11

### Plant Culture for Bioanalytical Analyses

[0588] For the bioanalytical analyses of the transgenic plants, the latter were grown uniformly a specific culture facility. To this end the GS-90 substrate as the compost mixture was introduced into the potting machine (Laible System GmbH, Singen, Germany) and filled into the pots. Thereafter, 35 pots were combined in one dish and treated with Previcur. For the treatment, 25 ml of Previcur were taken up in 10 l of tap water. This amount was sufficient for the treatment of approximately 200 pots. The pots were placed into the Previcur solution and additionally irrigated overhead with tap water without Previcur. They were used within four days.

[0589] For the sowing, the seeds, which had been stored in the refrigerator (at −20° C.), were removed from the Eppendorf tubes with the aid of a toothpick and transferred into the pots with the compost. In total, approximately 5 to 12 seeds were distributed in the middle of the pot.

[0590] After the seeds had been sown, the dishes with the pots were covered with matching plastic hood and placed into the stratification chamber for 4 days in the dark at 4° C. The humidity was approximately 90%. After the stratification, the test plants were grown for 22 to 23 days at a 16-h-light, 8-h-dark rhythm at 20° C., an atmospheric humidity of 60% and a CO₂ concentration of approximately 400 ppm. The light sources used were Powerstar HQI-T 250 W/D Daylight lamps from Osram, which generate a light resembling the solar color spectrum with a light intensity of approximately 220 μE/m²/s⁻¹.

[0591] The resistance plants were thinned when they had reached the age of 14 days. The plants, which had grown best in the center of the pot were considered the target plants. All the remaining plants were removed carefully with the aid of metal tweezers and discarded.

[0592] During their growth, the plants received overhead irrigation with distilled water (onto the compost) and bottom irrigation into the placement grooves. Once the grown plants had reached the age of 23 days, they were harvested.

### Example 12

### Metabolic Analysis of Transformed Plants

[0593] The modifications identified in accordance with the invention, in the content of above-described metabolites, were identified by the following procedure.

[0594] a) Sampling and Storage of the Samples

[0595] Sampling was performed directly in the controlled-environment chamber. The plants were cut using small laboratory scissors, rapidly weighed on laboratory scales, transferred into a pre-cooled extraction sleeve and placed into an aluminum rack cooled by liquid nitrogen. If required, the extraction sleeves can be stored in the freezer at −80° C. The time elapsing between cutting the plant to freezing it in liquid nitrogen amounted to not more than 10 to 20 seconds.

[0596] b) Lyophilization

[0597] During the experiment, care was taken that the plants either remained in the deep-frozen state (temperatures <−40° C.) or were freed from water by lyophilization until the first contact with solvents.

[0598] The aluminum rack with the plant samples in the extraction sleeves was placed into the pre-cooled (−40° C.) lyophilization facility. The initial temperature during the main drying phase was −35° C. and the pressure was 0.120 mbar. During the drying phase, the parameters were altered following a pressure and temperature program. The final temperature after 12 hours was +30° C. and the final pressure was 0.001 to 0.004 mbar. After the vacuum pump and the refrigerating machine had been switched off, the system was flushed with air (dried via a drying tube) or argon.

[0599] c) Extraction

[0600] Immediately after the lyophilization apparatus had been flushed, the extraction sleeves with the lyophilized plant material were transferred into the 5 ml extraction cartridges of the ASE device (Accelerated Solvent Extractor ASE 200 with Solvent Controller and AutoASE software (DIONEX)).

[0601] The 24 sample positions of an ASE device (Accelerated Solvent Extractor ASE 200 with Solvent Controller and AutoASE software (DIONEX)) were filled with plant samples, including some samples for testing quality control.

[0602] The polar substances were extracted with approximately 10 ml of methanol/water (80120, v/v) at T=70° C. and p=140 bar, 5 minutes heating-up phase, 1 minute static extraction. The more lipophilic substances were extracted with approximately 10 ml of methanol/dichloromethane (40/60, v/v) at T=70° C. and p=140 bar, 5 minute heating-up phase, 1 minute static extraction. The two solvent mixtures were extracted into the same glass tubes (centrifuge tubes, 50 ml, equipped with screw cap and pierceable septum for the ASE (DIONEX)).

[0603] The solution was treated with internal standards: ribitol, L-glycine-2,2-d₂, L-alanine-2,3,3,3-d₄, methionine-methyl-d₃, and α-methylglucopyranoside and methyl nonadecanoate, methyl undecanoate, methyl tridecanoate, methyl pentadecanoate, methyl nonacosanoate.

[0604] The total extract was treated with 8 ml of water. The solid residue of the plant sample and the extraction sleeve were discarded.

[0605] The extract was shaken and then centrifuged for 5 to 10 minutes at least 1 400 g in order to accelerate phase separation. 1 ml of the supernatant methanol/water phase (“polar phase”, colorless) was removed for the further GC analysis, and 1 ml was removed for the LC analysis. The remainder of the methanol/water phase was discarded. 0.5 ml of the organic phase (“lipid phase”, dark green) was removed for the further GC analysis and 0.5 ml was removed for the LC analysis. All the portions removed were evaporated to dryness using the IR Dancer infrared vacuum evaporator (Hettich). The maximum temperature during the evaporation process did not exceed 40° C. Pressure in the apparatus was not less than 10 mbar.

[0606] d) Processing the Lipid Phase for the LC/MS or LC/MS/MS Analysis

[0607] The lipid extract, which had been evaporated to dryness was taken up in mobile phase. The HPLC was run with gradient elution.

[0608] The polar extract, which had been evaporated to dryness was taken up in mobile phase. The HPLC was run with gradient elution.

[0609] e) Derivatization of the Lipid Phase for the GC/MS Analysis

[0610] For the transmethanolysis, a mixture of 140 μl of chloroform, 37 μl of hydrochloric acid (37% by weight HCl in water), 320 μl of methanol and 20 μl of toluene was added to the evaporated extract. The vessel was sealed tightly and heated for 2 hours at 100° C., with shaking. The solution was subsequently evaporated to dryness. The residue was dried completely.

[0611] The methoximation of the carbonyl groups was carried out by reaction with methoxyamine hydrochloride (5 mg/ml in pyridine, 100 μl for 1.5 hours at 60° C.) in a tightly sealed vessel. 20 μl of a solution of odd-numbered, straight-chain fatty acids (solution of each 0.3 mg/mL of fatty acids from 7 to 25 carbon atoms and each 0.6 mg/mL of fatty acids with 27, 29 and 31 carbon atoms in 3/7 (v/v) pyridine/toluene) were added as time standards. Finally, the derivatization with 100 μl of N-methyl-N-(trimethylsilyl)-2,2,2-trifluoroacetamide (MSTFA) was carried out for 30 minutes at 60° C., again in the tightly sealed vessel. The final volume before injection into the GC was 220 μl.

[0612] f) Analysis of the Various Plant Samples

[0613] The samples were measured in individual series of 20 plant samples each (also referred to as sequences). In screening experiments 20 different transgenic lines were analysed per sequence while in confirmation experiments each sequence contained at least 3 replicates per transgenic lines plus at least 5 wild-type plants as controls. The peak areas for each analyte were adjusted for the fresh weight established for the plant (normalized area). Ratio values were calculated by further normalization to the control. In screening experiments, this control was the median value calculated for a given analyte based on all normalized areas of all plants in the corresponding sequence. In confirmation experiments ratio values were calculated by dividing the normalized area by the mean of the corresponding data of the wild-type control group of the same sequence. The values obtained are referred to as ratio_by_control. They are comparable between sequences and indicate how much the analyte concentration in the mutant differs from the control group, which is either the wild type control (confirmation experiments) or the rest of the mutants (screening) of a given sequence. Appropriate controls were done before to proof that the vector and transformation procedure itself has no significant influence on the metabolic composition of the plants. Therefore the described changes in comparison with the control group were undoubtedly caused by the mutation.

[0614] As an alternative, the amino acids can be detected advantageously via HPLC separation in ethanolic extract as described by Geigenberger et al. (Plant Cell & Environ, 19, 1996: 43-55).

[0615] The results of the different plant analyses can be seen from the following table 2:

TABLE 2
Results of the analysis of the compound of the invention

| | | | Min and Max | |
|---|---|---|---|---|
| seqID | Accession | Metabolite | Ratio by WT | Method |
| 1 | At2g25320 | Methionine | 1.11-2.02 | LC |
| 7 | At3g07610 | Methionine | 1.49-2.77 | LC |
| 17 | At3g15600 | Methionine | 1.08-1.77 | LC |
| 64 | At1g14490 | Methionine | 1.01-1.83 | LC |
| 151 | At1g30570 | Methionine | 1.06-2.13 | GC |
| 228 | At2g21290 | Methionine | 1.14-1.35 | LC |
| 282 | At3g14230 | Methionine | 1.22-2.19 | LC |

[0616] Column 1 shows the seqID of the gene, which has been knocked out, column 2 display the respective genebank accession number. Column 3 shows the amino acid analyzed. Column 4 shows the ratio of the analyzed amino acid between the transgenic plants and the wild type. Column 5 indicates the analytical method.

[0617] When the analyses were repeated independently, all results proved to be significant.

[0618] Analysis of the selected metabolically changed lines

[0619] Since the lines were preselected for single insertion loci and a homozygous situation of the resistance marker, the disruption (or mutation) of single genes through the integration of the T-DNA were expected to have lead to the metabolic phenotype. Lines which showed a consistent phenotype were chosen for molecular analysis.

[0620] Genomic DNA was purified from approximately 100 mg of leaf tissue from these lines using standard procedures (either spins columns from Qiagen, Hilden, Germany or the Nucleon Phytopure Kit from Amersham Biosciences, Freiburg, Germany). The amplification of the insertion side of the T-DNA was achieved using two different methods. Either by an adaptor PCR-method according to Spertini D, Béliveau C. and Bellemare G., 1999, Biotechniques, 27, 308-314 using T-DNA specific primers

### LB1 (5′-TGA CGC CAT TTC GCC TTT TCA-3′; SEQ ID NO: 35) or

[0621] RB 1-2 (5′-CM CTT AAT CGC CTT GCA GCA CA-3′; SEQ ID NO: 36) for the first and

### LB2 (5′-CAG AAA TGG ATA MT AGC CTT GCT TCC-3′; SEQ ID NO: 37) or

[0622] RB4-2 (5′-AGC TGG CGT MT AGC GAA GAG-3′; SEQ ID NO: 38) for the second PCR respectively. Alternatively TAIL-PCR (Liu Y-G, Mitsukawa N, Oosumi T and Whittier R F, 1995, Plant J. 8, 457-463) was performed. In this case for the first PCR

### LB1 (5′-TGA CGC CAT TTC GCC TTT TCA-3′, SEQ ID NO: 35) or

[0623] RB1-2 (5′-CAA CTT AAT CGC CTT GCA GCA CA-3′; SEQ ID NO: 36), for the second PCR
LB2 (5′-CAG AAA TGG ATA MT AGC CTT GCT TCC-3′; SEQ ID NO: 37) or RB4-2 (5′-AGC TGG CGT MT AGC GAA GAG-3′, SEQ ID NO: 38) and for the last PCR

### LB3 (5′-CCA ATA CAT TAC ACT AGC ATC TG-3′; SEQ ID NO: 39) or

[0624] RB5 (5′-MT GCT AGA GCA GCT TGA-3′; SEQ ID NO: 40) were used as T-DNA specific primers for left or right T-DNA borders respectively.

[0625] Appropriate PCR-products were identified on agarose gels and purified using columns and standard procedures (Qiagen, Hilden, Germany). PCR-products were sequenced with additional T-DNA-specific primers located towards the borders relative to the primers used for amplification. For adaptor PCR products containing left border sequences primer

LBseq (5′-CAA TAC ATT ACA CTA GCA TCT G-3′; SEQ ID NO: 41) and for sequences containing right border sequences primer
RBseq (5′-AGA GGC CCG CAC CGA TCG-3′; SEQ ID NO: 42) were used for sequencing reactions. For TAIL PCR products containing left border sequences primer
Lbseq2 (5′-CTA GCA TCT GAA TTT CAT AAC C-3′; SEQ ID NO: 43) and for PCR products containing right border sequences primer
Rbseq2 (5′-GCT TGA GCT TGG ATC AGA TTG-3′; SEQ ID NO: 44) were used for sequencing reactions. The resulting sequences were taken for comparison with the available Arabidopsis genome sequence from Genbank using the blast algorithm (Altschul et al., 1990. J Mol Biol, 215:403-410).

[0626] Details on PCR products used to identify the genomic locus are given in table 3. Indicated are the identified annotated open reading frame in the Arabidopsis genome, the estimated size of the obtained PCR product (in base pairs), the T-DNA border (LB: left border, RB: right border) for which the amplification was achieved, the method which resulted in the indicated PCR product (explanation see text above), the respective restriction enzymes in case of adaptor PCR, and the degenerated primer in the case of TAIL PCR. Routinely degenerated primers

### ADP2 (5′-NGT CGA SWG ANA WGA A-3′; SEQ ID NO: 45),

### ADP3 (5′-WGTGNAGWANCANAGA-3′; SEQ ID NO: 46),

### ADP5 (5′-STT GNT AST NCT NTG C-3′; SEQ ID NO: 47),

### ADP6 (5′-AGWGNAGWANCANAGA-3′; SEQ ID NO: 48),

### ADP8 (5′-NTG CGA SWG ANT AGA A-3′; SEQ ID NO: 49),

### ADP9 (5′-NTG CGA SWG ANT AGA A-3′; SEQ ID NO: 50) and

[0627] ADP11 (5′-SST GGS TAN ATW ATW CT-3′; SEQ ID NO: 51) were used.

[0628] The identification of the insertion locus in each case was confirmed by a control PCR, using one of the above mentioned T-DNA-specific primers and a primer deduced from the identified genomic locus, near to the insertion side. The amplification of a PCR-product of the expected size from the insertion line using these two primers proved the disruption of the identified locus by the T-DNA integration.

[0629] Table 3: Details on PCR products used to identify the down-regulated genomic locus in lines showing increased Methionine.

TABLE 3
PCR-products

| | | PCR- | | | Restriction enzyme |
|---|---|---|---|---|---|
| SEQ ID | ORF | Product | Border | Method | or deg. primer |
| 1 | at2g25320 | 1000 | RB | Adapter | Mun I |
| 7 | at3g07610 | 820 | LB | Adapter | Spe I |
| 17 | at3g15600 | 750 | LB | Adapter | Psp1406 I/Bsp119 I |
| 64 | At1g14490 | 550 | LB | Adapter | SpeI |
| 151 | At1g30570 | 250 | LB | Adapter | Psp1406/Bsp119I |
| 228 | At2g21290 | 350 | LB | Adapter | SpeI |
| 282 | At3g14230 | 300 | LB | Adapter | BgIII |

Column 1 refers to the SEQ ID of the gene which has been knocked out, column 2 refers to the genebank accession of the gene, column 3 refers to the approximate length of the amplified PCR product, column 4 refers to the T-DNA border for which the PCR product was amplified, column 5 refers to the PCR method for amplification and column 6 refers to restriction enzyme of degenerate primer used in the PRC method (for detailed examplation to columns 5 and 6 see text above)

### Example 13

### Construction of Antisense Constructs for Repression of the Genes of the Invention

[0630] A fragment of SEQ ID NO: 7 is amplified by PCR. To enable cloning of the PCR product, restriction sites may be added to the primers used for the amplification. Alternatively recombination sites may be added to the primers to enable a recombination reaction. The PCR fragment is either cloned or recombined into a binary vector, preferently under control of a strong constitutive, tissue or developmental specific promoters in a way, that the orientation to the promoter is opposite of the direction the genes has in its original genomic position.

[0631] The amplification of the fragment of the SEQ ID NO: 7 was performed using the oligonucleotides that have been deduced from the gene sequence:

(SEQ ID NO: 52)

| | |
|---|---|
| a3g07610fw: | 5′-atattaattaaggtaattaggtatcatatct-3′ |

(SEQ ID NO: 53)

| | |
|---|---|
| a3g07610rev: | 5′-ataccatggggatctacgtaattcgccag-3′ |

[0632] The Oligonucleotides have been solved in water to give a concentration of 20 μM. The PCR reaction contained 5 μl Herculase buffer (Stratagene), 0.4 μl dNTPs (25 mM each) (Amersham), 0.5 μl Primer a07610fw, 0.5 μl Primer a07610rev, 0.5 μl Herculase (Stratagene), 0.5 μl gDNA and 42.6 μl water. The PCR was performed on MJ-Cycler Tetrad (BioZym) with the following program:

[0633] 4 min 94° C., followed by 30 cycles of 1 min 94° C., 1 min 50° C., 2 min 72° C. followed by 10 min 72° C. and cooling to 25° C.

[0634] The PCR product has been purified using a Kit from Qiagen. The DNA was subsequently digested with NcoI/PacI at 37° C. over night. The fragment was then cloned into the vector 1bxPcUbicolic which has been digested with NcoI/PacI.

[0635] The resulting construct was named 1bxPcUbianti3g07610

### Example 14

### Construction of RNAi Constructs for Repression of the Genes of the Invention

[0636] A fragment of SEQ ID NO: 7 is amplified by PCR. To enable cloning of the PCR product, restriction sites may be added to the primers used for the amplification. Alternatively recombination sites may be added to the primers to enable a recombination reaction. The PCR fragment is either cloned or recombined into a binary vector, preferently under control of a strong constitutive, tissue or developmental specific promoters in a way, that the fragment is introduced twice in the vector as an inverted repeat, the repeats separated by a DNA spacer.

[0637] The amplification of the fragment of the SEQ ID NO: 7 was performed using the oligonucleotides that have been deduced from the gene sequence:

(SEQ ID NO: 54)

| | |
|---|---|
| ri3g07610fw: | 5′-ataggtaccggtaattaggtatcatatct-3′ |

(SEQ ID NO: 55)

| | |
|---|---|
| ri3g07610rev: | 5′-atagtcgacggatctacgtaattcgccag-3′ |

[0638] The Oligonucleotides have been solved in water to give a concentration of 20 μM. The PCR reaction contained 5 μl Herculase buffer (Stratagene), 0.4 μl dNTPs (25 mM each) (Amersham), 0.5 μl Primer a07610fw, 0.5 μl Primer a07610rev, 0.5 μl Herculase (Stratagene), 0.5 μl gDNA and 42.6 μl water. The PCR was performed on MJ-Cycler Tetrad (BioZym) with the following program:

[0639] 4 min 94° C., followed by 30 cycles of 1 min 94° C., 1 min 50° C., 2 min 72° C. followed by 10 min 72° C. and cooling to 25° C.

[0640] The PCR product has been purified using a Kit from Qiagen. The DNA was subsequently digested with Asp718/SalI at 37° C. over night. The fragment was then cloned into the vector 10×PcUbispacer which has been digested with Asp718/SalI. The resulting construct was digested with XhoI/BsrGI and the same Asp718/SalI digested PCR fragment was ligated into this vector. Subsequently, the expression cassette giving rise to BASTA resistance was ligated as XbaI fragment into this vector that has been opened with XbaI and dephosphorilized before. The resulting construct was named 1 bxPcUbiri3g07610

### Example 15

### Construction of Cosuppression Constructs for Repression of the Genes of the Invention

[0641] A fragment of SEQ ID NO: 7 is amplified by PCR. To enable cloning of the PCR product, restriction sites may be added to the primers used for the amplification. Alternatively recombination sites may be added to the primers to enable a recombination reaction. The PCR fragment is either cloned or recombined into a binary vector, preferently under control of a strong constitutive, tissue or developmental specific promoters in a way, that the orientation to the promoter is identical to the direction the gene has in its original genomic position.

[0642] The amplification of the fragment of the SEQ ID NO: 7 was performed using the oligonucleotides that have been deduced from the gene sequence:

(SEQ ID NO: 56)

| | |
|---|---|
| c3g07610fw: | 5′-ataccatggggtaattaggtatcatatct-3′ |

(SEQ ID NO: 57)

| | |
|---|---|
| c3g07610rev: | 5′-atattaattaaggatctacgtaattcgccag-3′ |

[0643] The Oligonucleotides have been solved in water to give a concentration of 20 μM. The PCR reaction contained 5 μl Herculase buffer (Stratagene), 0.4 μl dNTPs (25 mM each) (Amersham), 0.5 μl Primer a07610fw, 0.5 μl Primer a07610rev, 0.5 μl Herculase (Stratagene), 0.5 μl gDNA and 42.6 μl water. The PCR was performed on MJ-Cycler Tetrad (BioZym) with the following program:

4 min 94° C., followed by 30 cycles of 1 min 94° C., 1 min 50° C., 2 min 72° C. followed by 10 min 72° C. and cooling to 25° C.

[0644] The PCR product has been purified using a Kit from Qiagen. The DNA was subsequently digested with NcoI/PacI at 37° C. over night. The fragment was then cloned into the vector 1 bxPcUbicolic which has been digested with NcoI/PacI. The resulting construct was named 1 bxPcUbicos3g07610.

### Example 16

### Reducing the Expression of the Genes of the Invention by Artificial Transcription Factors

[0645] The genes of the invention and their homologous ORFs in other species may also be down regulated by introducing a synthetic specific repressor. For this purpose, a gene for a chimeric zinc finger protein, which binds to a specific region in the regulatory or coding region of the genes of interests or its homologs in other species is constructed. The artificial zinc finger protein comprises a specific DNA-binding domain consting for example of zinc finger and optional an repression like the EAR domain (Hiratsu et al., 2003. Plant J. 34(5), 733-739 Dominant repression of target genes by chimeric repressors that include the EAR motif, a repression domain, in Arabidopsis.)

[0646] Expression of this chimeric repressor for example in plants then results in specific repression of the target gene or of its homologs in other plant species lead to increased metabolite production The experimental details especially about the design and construction of specific zinc finger domains may be carried out as described, or WO 01/52620 or Ordiz M I, (Proc. Natl. Acad. Sci. USA, 2002, Vol. 99, Issue 20, 13290) or Guan, (Proc. Natl. Acad. Sci. USA, 2002, Vol. 99, Issue 20, 13296).

### Example 17

### Engineering Ryegrass Plants by Repressing the Nucleic Acid Sequence Homologous of the Invention in Ryegrass

[0647] Seeds of several different ryegrass varieties can be used as explant sources for transformation, including the commercial variety Gunne available from Svalof Weibull Seed Company or the variety Affinity. Seeds are surface-sterilized sequentially with 1% Tween-20 for 1 minute, 100% bleach for 60 minutes, 3 rinses with 5 minutes each with de-ionized and distilled H₂O, and then germinated for 3-4 days on moist, sterile filter paper in the dark. Seedlings are further sterilized for 1 minute with 1% Tween-20, 5 minutes with 75% bleach, and rinsed 3 times with ddH2O, 5 min each.

[0648] Surface-sterilized seeds are placed on the callus induction medium containing Murashige and Skoog basal salts and vitamins, 20 g/l sucrose, 150 mg/l asparagine, 500 mg/l casein hydrolysate, 3g/l Phytagel, 10 mg/l BAP, and 5 mg/l dicamba. Plates are incubated in the dark at 25° C. for 4 weeks for seed germination and embryogenic callus induction.

[0649] After 4 weeks on the callus induction medium, the shoots and roots of the seedlings are trimmed away, the callus is transferred to fresh media, is maintained in culture for another 4 weeks, and is then transferred to MSO medium in light for 2 weeks. Several pieces of callus (11-17 weeks old) are either strained through a 10 mesh sieve and put onto callus induction medium, or are cultured in 100 ml of liquid ryegrass callus induction media (same medium as for callus induction with agar) in a 250 ml flask. The flask is wrapped in foil and shaken at 175 rpm in the dark at 23° C. for 1 week. Sieving the liquid culture with a 40-mesh sieve is collected the cells. The fraction collected on the sieve is plated and is cultured on solid ryegrass callus induction medium for 1 week in the dark at 25° C. The callus is then transferred to and is cultured on MS medium containing 1% sucrose for 2 weeks.

[0650] Transformation can be accomplished with either Agrobacterium or with particle bombardment methods. An expression vector is created containing a constitutive plant promoter and the repression construct of the gene in a pUC vector. The plasmid DNA is prepared from E. coli cells using with Qiagen kit according to manufacturer's instruction. Approximately 2g of embryogenic callus is spread in the center of a sterile filter paper in a Petri dish. An aliquot of liquid MSO with 10 g/l sucrose is added to the filter paper. Gold particles (1.0 μm in size) are coated with plasmid DNA according to method of Sanford et al., 1993 and are delivered to the embryogenic callus with the following parameters: 500 μg particles and 2 μg DNA per shot, 1300 psi and a target distance of 8.5 cm from stopping plate to plate of callus and 1 shot per plate of callus.

[0651] After the bombardment, calli are transferred back to the fresh callus development medium and maintained in the dark at room temperature for a 1-week period. The callus is then transferred to growth conditions in the light at 25° C. to initiate embryo differentiation with the appropriate selection agent, e.g. 250 nM Arsenal, 5 mg/l PPT or 50 mg/L Kanamycin. Shoots resistant to the selection agent are appearing and once rooted are transferred to soil.

[0652] Samples of the primary transgenic plants (TO) are analyzed by PCR to confirm the presence of T-DNA. These results are confirmed by Southern hybridization in which DNA is electrophoresed on a 1% agarose gel and transferred to a positively charged nylon membrane (Roche Diagnostics). The PCR DIG Probe Synthesis Kit (Roche Diagnostics) is used to prepare a digoxigenin-labelled probe by PCR, and used as recommended by the manufacturer.

[0653] Transgenic TO ryegrass plants are propagated vegetatively by excising tillers. The transplanted tillers are maintained in the greenhouse for 2 months until well established. The shoots are defoliated and allowed to grow for 2 weeks.

### Example 18

### Engineering Soybean Plants by Repressing the Nucleic Acid Sequence Homologous of the Invention in Soybean

[0654] Soybean can be transformed according to the following modification of the method described in the Texas A&M U.S. Pat. No. 5,164,310. Several commercial soybean varieties are amenable to transformation by this method. The cultivar Jack (available from the Illinois Seed Foundation) is commonly used for transformation. Seeds are sterilized by immersion in 70% (v/v) ethanol for 6 min and in 25% commercial bleach (NaOCl) supplemented with 0.1% (v/v) Tween for 20 min, followed by rinsing 4 times with sterile double distilled water. Removing the radicle, hypocotyl and one cotyledon from each seedling propagates seven-day seedlings. Then, the epicotyl with one cotyledon is transferred to fresh germination media in petri dishes and incubated at 25° C. under a 16-hr photoperiod (approx. 100 JE-m⁻²s−1) for three weeks. Axillary nodes (approx. 4 mm in length) are cut from 3 to 4 week-old plants. Axillary nodes are excised and incubated in Agrobacterium LBA4404 culture.

[0655] Many different binary vector systems have been described for plant transformation (e.g. An, G. in Agrobacterium Protocols. Methods in Molecular Biology vol 44, pp 47-62, Gartland KMA and MR Davey eds. Humana Press, Totowa, N.J.). Many are based on the vector pBIN19 described by Bevan (Nucleic Acid Research. 1984. 12:8711-8721) that includes a plant gene expression cassette flanked by the left and right border sequences from the Ti plasmid of Agrobacterium tumefaciens. A plant gene expression cassette consists of at least two genes—a selection marker gene and a plant promoter regulating the transcription of the repression cassette of the trait gene. Various selection marker genes can be used as described above, including the Arabidopsis gene encoding a mutated acetohydroxy acid synthase (AHAS) enzyme (U.S. Pat. Nos. 57,673,666 and 6,225,105). Similarly, various promoters can be used to regulate the repression cassette to provide constitutive, developmental, tissue or environmental repression of gene transcription as described above. In this example, the 34S promoter (GenBank Accession numbers M59930 and X16673) is used to provide constitutive repression of the repression cassette.

[0656] After the co-cultivation treatment, the explants are washed and transferred to selection media supplemented with 500 mg/L timentin. Shoots are excised and placed on a shoot elongation medium. Shoots longer than 1 cm are placed on rooting medium for two to four weeks prior to transplanting to soil.

[0657] The primary transgenic plants (TO) are analyzed by PCR to confirm the presence of T-DNA. These results are confirmed by Southern hybridization in which DNA is electrophoresed on a 1% agarose gel and transferred to a positively charged nylon membrane (Roche Diagnostics). The PCR DIG Probe Synthesis Kit (Roche Diagnostics) is used to prepare a digoxigenin-labelled probe by PCR, and is used as recommended by the manufacturer.

### Example 19

### Engineering Corn Plants by Repressing Nucleic Acid Sequence Homologous of the Invention in Corn

[0658] Transformation of maize (Zea Mays L.) is performed with a modification of the method described by Ishida et al. (1996. Nature Biotech 14745-50). Transformation is genotype-dependent in corn and only specific genotypes are amenable to transformation and regeneration. The inbred line A188 (University of Minnesota) or hybrids with A188 as a parent are good sources of donor material for transformation (Fromm et al. 1990 Biotech 8:833-839), but other genotypes can be used successfully as well. Ears are harvested from corn plants at approximately 11 days after pollination (DAP) when the length of immature embryos is about 1 to 1.2 mm. Immature embryos are co-cultivated with Agrobacterium tumefaciens that carry “super binary” vectors and transgenic plants are recovered through organogenesis. The super binary vector system of Japan Tobacco is described in WO patents WO94/00977 and WO95/06722. Vectors can be constructed as described. Various selection marker genes can be used including the maize gene encoding a mutated acetohydroxy acid synthase (AHAS) enzyme (U.S. Pat. No. 6,025,541). Similarly, various promoters can be used to regulate the repression cassette to provide constitutive, developmental, tissue or environmental repression of gene transcription. In this example, the 34S promoter (GenBank Accession numbers M59930 and X16673) is used to provide constitutive expression of the repression cassette.

[0659] Excised embryos are grown on callus induction medium, then maize regeneration medium, containing imidazolinone as a selection agent. The Petri plates are incubated in the light at 25° C. for 2 to 3 weeks, or until shoots develop. The green shoots are transferred from each embryo to maize rooting medium and incubated at 25° C. for 2 to 3 weeks, until roots develop. The rooted shoots are transplanted to soil in the greenhouse. T1 seeds are produced from plants that exhibit tolerance to the imidazolinone herbicides and which are PCR positive for the transgenes.

[0660] The T1 generation of single locus insertions of the T-DNA can segregate for the transgene in a 3:1 ratio. Those progeny containing one or two copies of the transgene are tolerant of the imidazolinone herbicide. Homozygous T2 plants can exhibited similar phenotypes as the T1 plants. Hybrid plants (F1 progeny) of homozygous transgenic plants and non-transgenic plants can also exhibited increased similar phenotypes.

### Example 20

### Engineering Wheat Plants by Repressing Nucleic Acid Sequence Homologous of the Invention in Wheat

[0661] Transformation of wheat is performed with the method described by Ishida et al. (1996 Nature Biotech. 14745-50). The cultivar Bobwhite (available from CYMMIT, Mexico) is commonly used in transformation. Immature embryos are cocultivated with Agrobacterium tumefaciens that carry “super binary” vectors, and transgenic plants are recovered through organogenesis. The super binary vector system of Japan Tobacco is described in WO patents WO94/00977 and WO95/06722. Vectors were constructed as described. Various selection marker genes can be used including the maize gene encoding a mutated acetohydroxy acid synthase (AHAS) enzyme (U.S. Pat. No. 6,025,541). Similarly, various promoters can be used to regulate the repression cassette to provide constitutive, developmental, tissue or environmental regulation of gene repression. In this example, the 34S promoter (GenBank Accession numbers M59930 and X16673) can be used to provide constitutive expression of the repression cassette.

[0662] After incubation with Agrobacterium, the embryos are grown on callus induction medium, then regeneration medium, containing imidazolinone as a selection agent. The Petri plates are incubated in the light at 25° C. for 2 to 3 weeks, or until shoots develop. The green shoots are transferred from each embryo to rooting medium and incubated at 25° C. for 2 to 3 weeks, until roots develop. The rooted shoots are transplanted to soil in the greenhouse. T1 seeds are produced from plants that exhibit tolerance to the imidazolinone herbicides and which are PCR positive for the transgenes.

[0663] The T1 generation of single locus insertions of the T-DNA can segregate for the transgene in a 3:1 ratio. Those progeny containing one or two copies of the transgene are tolerant of the imidazolinone herbicide. Homozygous T2 plants exhibited similar phenotypes.

### Example 21

### Engineering Rapeseed/Canola Plants by Repressing Nucleic Acid Sequence Homologous of the Invention in Rapeseed/Canola Plants

[0664] Cotyledonary petioles and hypocotyls of 5-6 day-old young seedlings are used as explants for tissue culture and transformed according to Babic et al. (1998, Plant Cell Rep 17: 183-188). The commercial cultivar Westar (Agriculture Canada) is the standard variety used for transformation, but other varieties can be used.

[0665] Agrobacterium tumefaciens LBA4404 containing a binary vector are used for canola transformation. Many different binary vector systems have been described for plant transformation (e.g. An, G. in Agrobacterium Protocols. Methods in Molecular Biology vol 44, pp 47-62, Gartland KMA and MR Davey eds. Humana Press, Totowa, N.J.). Many are based on the vector pBIN19 described by Bevan (Nucleic Acid Research. 1984.12:8711-8721) that includes a plant gene expression cassette flanked by the left and right border sequences from the Ti plasmid of Agrobacterium tumefaciens. A plant gene expression cassette consists of at least two genes—a selection marker gene and a plant promoter regulating the transcription of the repression cassette of the trait gene. Various selection marker genes can be used including the Arabidopsis gene encoding a mutated acetohydroxy acid synthase (AHAS) enzyme (U.S. Pat. Nos. 57,673,666 and 6,225,105). Similarly, various promoters can be used to regulate the repression cassette to provide constitutive, developmental, tissue or environmental regulation of gene repression. In this example, the 34S promoter (GenBank Accession numbers M59930 and X16673) can be used to provide constitutive expression of the repression cassette.

[0666] Canola seeds are surface-sterilized in 70% ethanol for 2 min., and then in 30% Clorox with a drop of Tween-20 for 10 min, followed by three rinses with sterilized distilled water. Seeds are then germinated in vitro 5 days on half strength MS medium without hormones, 1% sucrose, 0.7% Phytagar at 23° C., 16 hr. light. The cotyledon petiole explants with the cotyledon attached are excised from the in vitro seedlings, and are inoculated with Agrobacterium by dipping the cut end of the petiole explant into the bacterial suspension. The explants are then cultured for 2 days on MSBAP-3 medium containing 3 mg/l BAP, 3% sucrose, 0.7% Phytagar at 23° C., 16 hr light. After two days of co-cultivation with Agrobacterium, the petiole explants are transferred to MSBAP-3 medium containing 3 mg/l BAP, cefotaxime, carbenicillin, or timentin (300 mg/I) for 7 days, and then cultured on MSBAP-3 medium with cefotaxime, carbenicillin, or timentin and selection agent until shoot regeneration. When the shoots are 5 to 10 mm in length, they are cut and transferred to shoot elongation medium (MSBAP-0.5, containing 0.5 mg/l BAP). Shoots of about 2 cm in length are transferred to the rooting medium (MSO) for root induction.

[0667] Samples of the primary transgenic plants (TO) are analyzed by PCR to confirm the presence of T-DNA. These results are confirmed by Southern hybridization in which DNA is electrophoresed on a 1% agarose gel and are transferred to a positively charged nylon membrane (Roche Diagnostics). The PCR DIG Probe Synthesis Kit (Roche Diagnostics) is used to prepare a digoxigenin-labelled probe by PCR, and used as recommended by the manufacturer.

### Example 22

### Engineering Alfalfa Plants by Repressing Nucleic Acid Sequence Homologous of the Invention in Alfalfa

[0668] A regenerating clone of alfalfa (Medicago sativa) is transformed using the method of McKersie et al., 1999 Plant Physiol 119: 839-847. Regeneration and transformation of alfalfa is genotype dependent and therefore a regenerating plant is required. Methods to obtain regenerating plants have been described. For example, these can be selected from the cultivar Rangelander (Agriculture Canada) or any other commercial alfalfa variety as described by Brown DCW and A Atanassov (1985. Plant Cell Tissue Organ Culture 4: 111-112). Alternatively, the RA3 variety (University of Wisconsin) has been selected for use in tissue culture (Walker et al., 1978 μm J Bot 65:654-659).

[0669] Petiole explants are cocultivated with an overnight culture of Agrobacterium tumefaciens C58C1 pMP90 (McKersie et al., 1999 Plant Physiol 119: 839-847) or LBA4404 containing a binary vector. Many different binary vector systems have been described for plant transformation (e.g. An, G. in Agrobacterium Protocols. Methods in Molecular Biology vol 44, pp 47-62, Gartland KMA and MR Davey eds. Humana Press, Totowa, N.J.). Many are based on the vector pBIN19 described by Bevan (Nucleic Acid Research. 1984.12:8711-8721) that includes a plant gene expression cassette flanked by the left and right border sequences from the Ti plasmid of Agrobacterium tumefaciens. A plant gene expression cassette consists of at least two genes—a selection marker gene and a plant promoter regulating the transcription of the repression cassette of the trait gene. Various selection marker genes can be used including the Arabidopsis gene encoding a mutated acetohydroxy acid synthase (AHAS) enzyme (U.S. Pat. Nos. 57,673,666 and 6,225,105). Similarly, various promoters can be used to regulate the repression cassette that provides constitutive, developmental, tissue or environmental regulation of gene repression. In this example, the 34S promoter (GenBank Accession numbers M59930 and X16673) can be used to provide constitutive expression of the repression cassette.

[0670] The explants are cocultivated for 3 d in the dark on SH induction medium containing 288 mg/L Pro, 53 mg/L thioproline, 4.35 g/L K₂SO₄, and 100 μm acetosyringinone. The explants are washed in half-strength Murashige-Skoog medium (Murashige and Skoog, 1962) and plated on the same SH induction medium without acetosyringinone but with a suitable selection agent and suitable antibiotic to inhibit Agrobacterium growth. After several weeks, somatic embryos are transferred to BOi2Y development medium containing no growth regulators, no antibiotics, and 50 g/L sucrose. Somatic embryos are subsequently germinated on half-strength Murashige-Skoog medium. Rooted seedlings are transplanted into pots and grown in a greenhouse.

[0671] The T0 transgenic plants are propagated by node cuttings and rooted in Turface growth medium. The plants are defoliated and grown to a height of about 10 cm (approximately 2 weeks after defoliation).

### Example 23

### Knock Out of the Genes of the Invention by Homologous Recombination

[0672] Identifying mutations in the genes of the invention in random mutagenized populations

[0673] a) In Chemically or Radiation Mutated Population

[0674] Production of chemically or radiation mutated populations is a common technique and known to the skilled worker. Methods are described by Koorneef et al. 1982 and the citations therein and by Lightner and Caspar in “Methods in Molecular Biology” Vol 82. These techniques usually induce pointmutations that can be identified in any known gene using methods such as TILLING (Colbert et al. 2001).

[0675] b) T-DNA or Transposon Mutated Population by Reserve Genetics

[0676] Reverse genetic strategies to identify insertion mutants in genes of interest have been described for various cases eg. Krysan et al., 1999 (Plant Cell 1999, 11, 2283-2290); Sessions et al., 2002 (Plant Cell 2002, 14, 2985-2994); Young et al., 2001, (Plant Physiol. 2001, 125, 513-518); Koprek et al., 2000 (Plant J. 2000, 24, 253-263); Jeon et al., 2000 (Plant J. 2000, 22, 561-570); Tissier et al., 1999 (Plant Cell 1999, 11, 1841-1852); Speulmann et al., 1999 (Plant Cell 1999, 11, 1853-1866). Briefly material from all plants of a large T-DNA or transposon mutagenized plant population is harvested and genomic DNA prepared. Then the genomic DNA is pooled following specific architectures as described for example in Krysan et al., 1999 (Plant Cell 1999, 11, 2283-2290). Pools of genomics DNAs are then screened by specific multiplex PCR reactions detecting the combination of the insertional mutagen (eg T-DNA or Transposon) and the gene of interest. Therefore PCR reactions are run on the DNA pools with specific combinations of T-DNA or transposon border primers and gene specific primers. General rules for primer design can again be taken from Krysan et al., 1999 (Plant Cell 1999, 11, 2283-2290) Rescreening of lower levels DNA pools lead to the identification of individual plants in which the gene of interest is disrupted by the insertional mutagen.

### EQUIVALENTS

[0677] Those of ordinary skill in the art will recognize, or will be able to ascertain using no more than routine experimentation, many equivalents to the specific embodiments of the invention described herein. Such equivalents are intended to be encompassed by the following claims.

The application's sequence listing, which the Patent Office published only in electronic form, follows.

SEQUENCE LISTING (442 sequences)

SEQ ID NO: 1 - DNA, 5317 bp, Arabidopsis thaliana
  CDS (1)..(4992)
atgaagcaaagctcatcggaggcagtgtcatcgtcttcttcatcagccgccgcggaccaatctcatccctccgtttcatcatcatcatcggagaagcctctatcttcctcttcgatttctccagcggaggatcttcaggttggatcgtcgagagatggaagcggaggtgcacaagagatcgtagccgtcgatcgtccaggagagtactcggcgttgtgtagatggacggttgagagcttcacacgtgtcaaagctaaggcactgtggagcaagtacttcgatgtaggaggatacgattgtcgtctcttggtttatcctagaggtgattctcaggctcttcctggttacatcagcatctatcttcagatcatggaccctagaggaaccacttcgtctcgttgggattgtttcgctagctatcgtctctctatcgttaatcttgtcgatgattctttaacaatccataaggattcttggcatagattctctagtaagaagaaatctcatggatggtgtgatttcaccttgaactctagcattttggatcctaagatgggttttttgtttaacaatgattcgttgcttatcactgctgatatcttgattctaaacgagtctgtgagctttagtcgtgataataacaatgaggggcaatctttgtataaggaaaattccatagctggaccaatgccggatgtgttgagtgggaagttcacttggaaggtaaataattttagtttgtttaaggatatgataaagacgcagaagattatgagccctgttttcccagctggggagtgtaatttgaggatcagtgtgtaccagagtgttgttaattcgcaagaatatatatcaatgtgtttggagagtaaagagactgagaagactttggtttcagataggagctgttggtgtttgtttaggatgtcagctttgaatcagaagcctggttgcactcacatgcatagggattcatatggcaggtttgctgctgataataagagtggggacaatacgagcttgggctggaatgattacatgaaaatgtctgagtttgtgaacccggaagctgggtttttactcgatgatatggctgtctttagcacttcgtttcatgttattaaagagttcagtagctttactaagaatggtgggttgattgggggaaggaatggggctggagctaggaagtcagatggacacatgggaaaattcacttggagaattgaaaatttcacaaggttaaaggatcttctaaagaagaggaagataacaggtctttgcatcaaaagtaagaggtttcaaattgggaaccgggattgtcgacttattgtttatccccgagtatttcttgaagtgacagattcacgaagctcaagtgattggagctgttttgttagccaccgactatcagttgtgaaccagagattggaggagaagtcggtgacaaaagaatctcagaatcgctactcgaaagctgcaaaggattggggttggcgtgagtttgtgacacttactagtttgtttgatcaagactctggctttcttgttcaagacactgttgttttctccgctgaggttcttattttgaaagagacatctgctacaaaagagtatgtggaggcagactcaactaattcagtttctccgactgataacagcgtcaaaaaaagttcatttacttggaaagtggaaaatttcttagccttcaaagagataatggaaacacgaaagatttttagcaaattctttcaggctggtggatgtgaactccggattggtgtatatgagtcctttgacaccatatgcatatatttagagagtgatcaatctgcgggtacagatgtggacaataatttctgggttaagtacaagatgggtattctgaaccaaaagaatccggccaaaagtgtgtggaaggagtcatctatatgtaccaagacatggaataattccgttctacagtttatgaaggtgtctgacatgttggaggctgatgctgggtttcttgtgcgtgacacagttgtgtttgtgtgtgaaatattggattgttgtccttggtttgagttttcagacctagaggtactggcttcagatgatgaccaagatgccttaaccactgatcctgatgaaattattgattctgaggaaagtgagggcataagcggagatgaggaagacacatttcgagattttctttcccgagctggattccatctcacgtttggggagaatccttcacaaccacaagttactctccgtgagaagcttctaatggatgcgggtgcaattgctgggtttcttactggcttgcgtgtatatcttgatgacccaactaaagtaaagcgtttacttcttccgactaaaatatcttgtaatgatagaagcaagctaataaagagtgatgaatcttcccctagcctaatgaatttgctgatgggtgttaaagttctacagcaagccattattgatttacttctagatattatggttgagtgttgccaaccttcagaggaaggctctcactctgagccgtctttattatccccaaagacagatggttgcgtggctgcaacttcatcggagtcaacaagggaacgaggagcagcagaaccttcgcaacatcttgttgacgaaagatttaaatctgatacagatgctaccctcagtacctcagctgtaccaagctcagagatgaatgggatcgatttgcttgagaaagcccttgcaatagagcctatgtctcctcctaccacatctgctgggcaatcttctgatgcttcagtccaatcaaagacaaaatggccggaacagtctgaggagctattgggactgattgtgaattcacttaaaacccttgatgcggctgttccacaaggttgtccagagcctagacgacgaccacactctgctcaaaagattgctcttgttttagacagagcacccaaacatttgcaaccagatttagttagtctggttcccaaattggttgagcattcagagcacccactggctgctttagcacttatagaacggcttcaaaagcctgaagctgaaccagcgttgcgtgaaccagtatacaatgctcttagccagttagaatgcgacagtgaagtgtgggaggacattctatctcagtcttttgagcttttgagcgacttaaatgaggaatctcttgtggcggccattcatttcacatttaagactgcctcccagtgccaacacctacctgaagccgtaaatgcagtccgtgaacggcttaaaagtctgggtgctgatgtgtctctttgtgtccttgactatttgagtaaaaccgtacacagttggcctggtattgccgaaatgatacttagggatatcaacactgacgacagtgtaggtgccaattttgcaacattaccctgcgggccttttctgattggtgaaaatgagactgcctccgaaatggcggatttgatggaagaacatatattctatgcaaataggcagttttttgatgtctacattctgctggaaatgttgtccatatcgtgcctagctgaagaggcatctcaaacatttgaaagagctgttgctcgtggagccattgttgctcaggctgttgccatggtccttgaaaaacaacgtgttcagagcccaaatctgaatgctacaagtggggatgcttctcttaagcatcaagatcctgtattggagggagaagccagtgagcaaccagccactggagggactgagttcaggataatccttaatcttgctgagacattaactcattctagagatcctcaagtgaggggatttgtgaaaatgctatacacaatattattcaagtggtttccggatcagccctttagggttcaaatactgaggagactcgtagacagattcaccagccctacgagtagcagccacgatttagacttagagttggagattctagctattctgatttttcaggagcaagaggttgcgagacctgttttagccatgctgaagaaggttgtggaacatgcaaatattgacagggcggccctgtggcaccaattgcgtgcaaacaaggaagaacttgtccggttgaaggaagaaaagaagatagagattcaatctatgacaaaggagaaatctagcatcacccaaaaattaagtgaatctgaggctgcaaatacccgtcttaagtctgaaatgaaagctgaggcggaccggttttctcgagaaaagaaggatctggtagaacagtttagggatgtggagagtcagctggaatggatccgatcagaacgtcaagatgagatagataagctctcgtctgaaaagaaaactcttttggatcgccttcacgaagcagagacgcaacttgctttgcaaaaaacccgaaagcgtgatgaactcaagaaggtaggaaaagagaaaaatgctctaaccgagaagctaaaggtaacagaggcagctcggaaaagatttgaagaagagttgaaacggtatgccactgagaatgtaactcgggaggaattacgcaagtcacttgaggatcaaatcaggcaattgacacagacagtaggacagacaaaagaagagaaacgagagaaagaagatcagattgctcggtgtgaagcttacattgatggaatggaatccaaactccaagcttgccagcaatacatccacacactagaatcctcgctccgagaggagatttcaagacatgcgcctctgtacggtgccaatttagagtctctatcgatgaaggaactggatacaatagctcgtatccatgaggaagggctaagacagatccatgcccttcaacaacgtaagggccatacattatcacacggtctccctcagggtcacacactttacccgactacaccgcctcagcttccaccaatggcaatcggtttgccacctcagcttatacctaatggttcaggggttcactcaaacggtcatatcaacggttcggtcaggccttggtttagtcaccacacctaaaaaaatacatcttttttttcataggaagactacacaaaagaatgatggtctcttgagtttgtgaggtaaatcaatcaatcgatcaacatcatcaatgtttaattttccatatatatttatttttctctgagattttccgaggggtttttggctgctagaaccattggggggtcaaagtagaagattaataaaaatagaggggatacagatgcacaaatttcattgtgaaagaaaaaaagaaatgttgtaaaaggctaaaaagctgttatgtcgaatggaactaacagttgcaaagagtaccttaatgcatcttctatttttggct

SEQ ID NO: 2 - protein, 1663 aa, Arabidopsis thaliana
MKQSSSEAVSSSSSSAAADQSHPSVSSSSSEKPLSSSSISPAEDLQVGSSRDGSGGAQEIVAVDRPGEYSALCRWTVESFTRVKAKALWSKYFDVGGYDCRLLVYPRGDSQALPGYISIYLQIMDPRGTTSSRWDCFASYRLSIVNLVDDSLTIHKDSWHRFSSKKKSHGWCDFTLNSSILDPKMGFLFNNDSLLITADILILNESVSFSRDNNNEGQSLYKENSIAGPMPDVLSGKFTWKVNNFSLFKDMIKTQKIMSPVFPAGECNLRISVYQSVVNSQEYISMCLESKETEKTLVSDRSCWCLFRMSALNQKPGCTHMHRDSYGRFAADNKSGDNTSLGWNDYMKMSEFVNPEAGFLLDDMAVFSTSFHVIKEFSSFTKNGGLIGGRNGAGARKSDGHMGKFTWRIENFTRLKDLLKKRKITGLCIKSKRFQIGNRDCRLIVYPRVFLEVTDSRSSSDWSCFVSHRLSVVNQRLEEKSVTKESQNRYSKAAKDWGWREFVTLTSLFDQDSGFLVQDTVVFSAEVLILKETSATKEYVEADSTNSVSPTDNSVKKSSFTWKVENFLAFKEIMETRKIFSKFFQAGGCELRIGVYESFDTICIYLESDQSAGTDVDNNFWVKYKMGILNQKNPAKSVWKESSICTKTWNNSVLQFMKVSDMLEADAGFLVRDTVVFVCEILDCCPWFEFSDLEVLASDDDQDALTTDPDEIIDSEESEGISGDEEDTFRDFLSRAGFHLTFGENPSQPQVTLREKLLMDAGAIAGFLTGLRVYLDDPTKVKRLLLPTKISCNDRSKLIKSDESSPSLMNLLMGVKVLQQAIIDLLLDIMVECCQPSEEGSHSEPSLLSPKTDGCVAATSSESTRERGAAEPSQHLVDERFKSDTDATLSTSAVPSSEMNGIDLLEKALAIEPMSPPTTSAGQSSDASVQSKTKWPEQSEELLGLIVNSLKTLDAAVPQGCPEPRRRPHSAQKIALVLDRAPKHLQPDLVSLVPKLVEHSEHPLAALALIERLQKPEAEPALREPVYNALSQLECDSEVWEDILSQSFELLSDLNEESLVAAIHFTFKTASQCQHLPEAVNAVRERLKSLGADVSLCVLDYLSKTVHSWPGIAEMILRDINTDDSVGANFATLPCGPFLIGENETASEMADLMEEHIFYANRQFFDVYILLEMLSISCLAEEASQTFERAVARGAIVAQAVAMVLEKQRVQSPNLNATSGDASLKHQDPVLEGEASEQPATGGTEFRIILNLAETLTHSRDPQVRGFVKMLYTILFKWFPDQPFRVQILRRLVDRFTSPTSSSHDLDLELEILAILIFQEQEVARPVLAMLKKVVEHANIDRAALWHQLRANKEELVRLKEEKKIEIQSMTKEKSSITQKLSESEAANTRLKSEMKAEADRFSREKKDLVEQFRDVESQLEWIRSERQDEIDKLSSEKKTLLDRLHEAETQLALQKTRKRDELKKVGKEKNALTEKLKVTEAARKRFEEELKRYATENVTREELRKSLEDQIRQLTQTVGQTKEEKREKEDQIARCEAYIDGMESKLQACQQYIHTLESSLREEISRHAPLYGANLESLSMKELDTIARIHEEGLRQIHALQQRKGHTLSHGLPQGHTLYPTTPPQLPPMAIGLPPQLIPNGSGVHSNGHINGSVRPWFSHHT

SEQ ID NO: 3 - DNA, 2082 bp, Arabidopsis thaliana
  CDS (1)..(2082)
atgttgtcgtcttcttcatcagccgcagaccaatctcacccctccatttcatcggagaagcctctctcctcatctagagatgaaagcggaggtgcacaagagatcgtagccgtcgatcgtccaggagagtacacggcgttgtgtagatggacggttgagagcttcacacgtgtcaaagctaaggcactgtggagcaagtacttcgatgtaggaggatacgattgtcgtctcttggtttatcctagaggtgattctcaggctcttcctggctccatcagcatctaccttcagatcattgaccctcgtggaaccagttcatctctgtgggactgtttcgctagctaccaactctctatcatcaaccatgtcgatgattctctcacaatccgtaagaattcttggcatagattctctaataagaagagatctcatggatggtgcgatttcactttaaactctagtgttttggatcctaagatggggtttttgtttaacaatgattccttgcttatcacggctgatattatgattctcaatgagtctgtgagctttagtattgataataacaatgagtccgtagttggatcaatgactgatgtgttgagtggaactttcacttggacggttgaaaattttagcatgtttaaggaaatgataaagacacagaagataacgagtcctgttttcgtagctggggagtgttttttgaggattggtgtttaccagagtgtggttaatgcgcaagagtacttctccatgtgtttggacagtacagataccgaaaagagtgttttatcggacaagagcagttggtgtttatttagcatgtcagctttgaatcagaagcatggttgcactaacatgaataaagagtcttatgggaggtttgctgctgataataagagtggggacaatacaggattgggatggaacgattacatgaagatgtctgactttgtgaacccggacgcggggtatttactcgatgacaaggctgtctttagcacctcatttgatgttatcaaagagttcagtagctttactaagaatgggactggaaatggatacatgggaaagttcagttggagaattgaaaatttcacaagcttagttgatcttcttgagaagaggaagataaccggtctttacatcaaaagtaagaggtttcaaattgggaaccgggattgtcgacttattgtttatccccgagggcagtcgcagccaccaagccatctttctatatttcttgaagtgacagattcacgaagctctagtagtgattggagttgttttgttagccaccgactatcagttgtgaaccagagatcagaggagaagtcggtgacaaaggaatctcagaatcgattctcgaaagccgaaaaagattggggttggcgtgagtttgtgacacttactagtttgtttgatcaggactctggatttcttgttcaagactctgttgtattctccgttgaggttcttatgttgaaagaaacatctctaacaaaagactacacggaggcagaatctgctagttcagtttcacaaattgataaaaccgtgaaaagttcatttacttggaaagtggagaatttcttggccttcaagggaataatggaaaaacgaaagatatttagcaaattctttcaagctggtggatgtgaacttcggattggtgtatatgagtcctttgacaccatatgcatatatttagagagtggtcaatctgcgggtaacgatgtggataataatttatgggttaagtacaagatgggtattctgaaccaaaagaatccggccaaaagtgtgtggaaggagtcatctctatgtaccaagacatggaataattctgttctactgtttatgaaggtgtctgatatgttagaggctgatgctgggtttcttgtgcgtgacactcttgtgtttgtgtgtgaaatattggattgttgtccttggtttgagttttcagacctagaggtcttggcttcagatgatgttcaagatgccttgaccacgaatcctgatgaagttattggttctgagaaaagtgaggaagacacattccgtcaggtcagtccgtga

SEQ ID NO: 4 - protein, 693 aa, Arabidopsis thaliana
MLSSSSSAADQSHPSISSEKPLSSSRDESGGAQEIVAVDRPGEYTALCRWTVESFTRVKAKALWSKYFDVGGYDCRLLVYPRGDSQALPGSISIYLQIIDPRGTSSSLWDCFASYQLSIINHVDDSLTIRKNSWHRFSNKKRSHGWCDFTLNSSVLDPKMGFLFNNDSLLITADIMILNESVSFSIDNNNESVVGSMTDVLSGTFTWTVENFSMFKEMIKTQKITSPVFVAGECFLRIGVYQSVVNAQEYFSMCLDSTDTEKSVLSDKSSWCLFSMSALNQKHGCTNMNKESYGRFAADNKSGDNTGLGWNDYMKMSDFVNPDAGYLLDDKAVFSTSFDVIKEFSSFTKNGTGNGYMGKFSWRIENFTSLVDLLEKRKITGLYIKSKRFQIGNRDCRLIVYPRGQSQPPSHLSIFLEVTDSRSSSSDWSCFVSHRLSVVNQRSEEKSVTKESQNRFSKAEKDWGWREFVTLTSLFDQDSGFLVQDSVVFSVEVLMLKETSLTKDYTEAESASSVSQIDKTVKSSFTWKVENFLAFKGIMEKRKIFSKFFQAGGCELRIGVYESFDTICIYLESGQSAGNDVDNNLWVKYKMGILNQKNPAKSVWKESSLCTKTWNNSVLLFMKVSDMLEADAGFLVRDTLVFVCEILDCCPWFEFSDLEVLASDDVQDALTTNPDEVIGSEKSEEDTFRQVSP

SEQ ID NO: 5 - DNA, 1788 bp, Arabidopsis thaliana
  CDS (1)..(1788)
atgggcagcaccgtcttggacgcaaacccgtcaaccttaagagaacatccaccttcctcatattccatcaagtttgagaatatcgcagaactcgacgatggcaaatacgaatctagtcttttcgcagctggcgggtacaactggagattggtcatttatccaaaaggaaacgcaaaagacgaagggagtggatttatttcaatgtatgtggagattgatagcacaaacctcttgtcatcaccactaactggcgtgtttgcgtatctcgtattctttgtctacaacaagaaaacagacaaatactttactattaaagatcaatgtgaatttggtgttgatgttctggttgctccatcccttactaaatgggaagtcgtgtcctttaatcagaaaatccttgatcccaagttctcgtggtctctcaagaaatttaaagagttaaaagaggagttatacaactcagacaagtttttagtaggaggaaggcaatggtttctaaaggtgcatcctaagggtgttaaagcacgagacaactcgttatccatttatgtgtatttaagtgaaagtgaaacactcaatgcagaggagaaaatctacacgcgagtacatcttagagttttagatccgtttggatccattcaccaagccgggcaatgcaacttctggcgcacaaatacaaataaaaaccaaggctatggttggcctacttttgcgtctttagataaagtgcgagagaagtacttggacaatgagggttctttgaacatagagattgaatttgcagttgtttctagcaccaaatactctcctattctgattctctctagtctcgcttcaggttcaatgatgtgttcaagcgtatcttcaacaactcttcgaagctggagagaacgtactcctaattcttactcactcaagctccaaaacatctcccaagtcgagaaatcaactctcttctctgatggcaagtatcaatcccgtcttttctcctctggtggatacaactggagaatgatcatatacccgaaagggaatcgcaaagacgatggaagtgggtttatttcaatgtatgttgaaatagatagcacaagccttttgactacacctaccactgaggtgtttgccgatctacggtttttcgtatttaacaaaaaagaaaataagtactatactattcaacatgtagagtcgaagctattcaatgcattcagaacaatatggggattggcgcaagtgcttccagttgatacattcactgatcctaaaaacggatatatttttgagggagatcaatgcgagtttggtgttgatgtcattgttgctgcacctcctactaattgggaaattcacactttacatgaagcactaagtcaacccaagttcttttggacggtcaagaatttctctgagctgaacaataatgtttacacatcaggcaatttttcgatgagagaaaggaaatgggttctaaagttgtatcccaagggggacgtaaaaggagaccgaaaatggttatccctttatctatatctcgatcaaagtgaaacactaaaggaaagtgaaaagattttcgtgcaagctcaattgcgagttttagacccacgtggatccaatcacgtgacacacaaaatttcgtcttggtacaccagctcaaatacggcttggggatacagaaaatttgtgtctctagctgaaattcctaaagcttacttggacaaggacactttaaaagtgcagattgatgttgaagttgtttctgaagcagaattctctccttccatgatttaa

SEQ ID NO: 6 - protein, 595 aa, Arabidopsis thaliana
MGSTVLDANPSTLREHPPSSYSIKFENIAELDDGKYESSLFAAGGYNWRLVIYPKGNAKDEGSGFISMYVEIDSTNLLSSPLTGVFAYLVFFVYNKKTDKYFTIKDQCEFGVDVLVAPSLTKWEVVSFNQKILDPKFSWSLKKFKELKEELYNSDKFLVGGRQWFLKVHPKGVKARDNSLSIYVYLSESETLNAEEKIYTRVHLRVLDPFGSIHQAGQCNFWRTNTNKNQGYGWPTFASLDKVREKYLDNEGSLNIEIEFAVVSSTKYSPILILSSLASGSMMCSSVSSTTLRSWRERTPNSYSLKLQNISQVEKSTLFSDGKYQSRLFSSGGYNWRMIIYPKGNRKDDGSGFISMYVEIDSTSLLTTPTTEVFADLRFFVFNKKENKYYTIQHVESKLFNAFRTIWGLAQVLPVDTFTDPKNGYIFEGDQCEFGVDVIVAAPPTNWEIHTLHEALSQPKFFWTVKNFSELNNNVYTSGNFSMRERKWVLKLYPKGDVKGDRKWLSLYLYLDQSETLKESEKIFVQAQLRVLDPRGSNHVTHKISSWYTSSNTAWGYRKFVSLAEIPKAYLDKDTLKVQIDVEVVSEAEFSPSMI

SEQ ID NO: 7 - DNA, 3084 bp, Arabidopsis thaliana
  CDS (1)..(3084)
atggattctgtggaggaagaaggtgttgttagggttgaagaagagaacggacgcggtggtctccgtaggcatcggagggtttctacgaagctggcgaattacgtagatcctccgactgacgacgaagaagatggaggacccaagcgaaagggcaaaaggggtggaaatagggctccgaaaaagacaccgaagaaagacgaggagatgcaaaagaacgaaattgatgaagcaaaccgagtcactggtctggtgaaggaaaaaagagccgcgactaagattctgaatcgcaaagactccattattgaagtaggagaagcttctggaagcatgcccaaggaagtaaagggaattaggattgggaaaaggaagggagaaatcgatggtgagattccaactaagccgggcaagaagccaaagactacagtagacccgagaatcattggttacagaccggacaatatgtgccatcaatgtcaaaagagcgataggattgttgaacggtgtcagacctgcaatagtaagcgttattgtcatccatgcttggacacttggtacccccttatagcaaaagaagatgttgccaagaaatgcatgttctgctctagtacttgcaattgcagagcatgcttgcgtctagatactaaattgaaagggataaattcgaacctcatagtcagcgaggaagaaaaggtccaagcctctaagtttattctgcagagccttctcccacatctgaaaggaataaatgatgaacaagttgctgagaaggaagttgaggccaaaatatacggactgaagtttgaagaggtgaggccccaagacgctaaagctttccctgatgaaagactatactgtgatatctgcaagacttctatctatgatctccataggaattgcaagtcctgtagttttgatatctgccttagctgttgccttgagatccgcaatggaaaggctctggcatgtaaggaggatgtgtcttggaattatattaaccgaggtttagagtatgaacatggacaagaaggaaaagtgattgaaaagccggcgaataagctagatgataagttgaaagataagctggatggtaagccggatgataagccgaagggtaagccaaagggtaggccaaagggtaagccggatgataagccgaagggtaaactgaagggtaagcaggatgataaaccggatgataagccagatgagaagccggttaatacagaccatatgaagtacccttctctgtggaaagcaaatgaagctgggatcattacttgttgttgtggtgctggggagttagtgctgaaacgactacttccggatggttggatatctgagttggtcaacagagttgaaaaaactgctgaagctggcgagcttttgaatttacctgaaacggttttggagcgatgcccttgttctaactctgacagacatattgacatagacagctgtaatttgttaaaagctgcttgtcgagaaggttcagaagacaattatctttactctccaagtgtatgggatgttcaacaagatgatttgaagcattttcagcaccattgggtaaaaggcgagcctgtgattgtgagaaatgtgcttgaagctacatctggtttaagctgggaaccaatggtaatgcatcgtgcctgccgccagataagccatgtccagcatggatcacttaaggatgttgttgctgttgattgtttggacttctgtgaggtaaaagttaatcttcatgaattttttactggatacacggatggccgatatgatcgaatgggttggccactagttctgaaactgaaagattggcctccagctaaagtcttcaaagataacttgccacgtcatgctgaggagttcttatgtagtttgcctttgaagcattacactcatccggttaatggacctttgaatctcgctgtcaagcttccccaaaattgcttgaagccagacatgggaccaaagacgtacgttgcttctggatttgctcaagaattaggccgtggagattctgttactaagctccactgcgacatgtctgatgcggtgaatattttgacgcacatatctgaagtgcccaatatgcaacctggaattggaaatctgaaaaagaagcatgccgaacaagatctcaaggagctgtatagctcagtagctaacaaggaggaaatgatggagattcttgaaaattccagacaacaagtccaaaatgttgaaactgatgatggagctctttgggacattttccgtagagaagatattcctaaattagaaagttacattgagaaacatcacaaggagttcagacatctctactgctgtcctgtgtctcaggttgttcatcctatacatgaccagaacttctatctgacgcggtatcatataatgaagctgaaagaagaatatggcattgaaccttggaccttcaatcagaagcttggtgatgctgttttgatacctgtaggttgccctcatcaagttagaaatttgaagtcctgcaataaggtagcgcttgacttcgtctcacctgaaaatgtcagcgagtgtttacgcttgacaaaacagtatcgtctacttccaccaaatcattttgcaaaagaagacaagttaggggttaagaagatgatagtccatgcagttgataaagctctcagagacttaagtggagagaagtctccagaacctgaagagaagaaacaaaatatgagagggccgaagaagggggcagccaaggcagttgccaaggctctcaaagacttatctccaagtgaaaagaagtcttcggaagcagctgaagaggagatatcaaatgggatagtcaatgcaatcgataagggtctcaaagacttacctccaagtgaagagaagtcttccgaagccaaagtggagatatcaaatgggatagtcagtgcaatggataaggatctcgaacacatatcttcaagcgaaaagaagtctacggaagaggaaggggtgaaaagaccaaatattgtgaggacatatgagcggagaaaaaagctgggaagtgaagtaaccaacgcatacattgacagattagaaatggagaagatgtag

SEQ ID NO: 8 - protein, 1027 aa, Arabidopsis thaliana
MDSVEEEGVVRVEEENGRGGLRRHRRVSTKLANYVDPPTDDEEDGGPKRKGKRGGNRAPKKTPKKDEEMQKNEIDEANRVTGLVKEKRAATKILNRKDSIIEVGEASGSMPKEVKGIRIGKRKGEIDGEIPTKPGKKPKTTVDPRIIGYRPDNMCHQCQKSDRIVERCQTCNSKRYCHPCLDTWYPLIAKEDVAKKCMFCSSTCNCRACLRLDTKLKGINSNLIVSEEEKVQASKFILQSLLPHLKGINDEQVAEKEVEAKIYGLKFEEVRPQDAKAFPDERLYCDICKTSIYDLHRNCKSCSFDICLSCCLEIRNGKALACKEDVSWNYINRGLEYEHGQEGKVIEKPANKLDDKLKDKLDGKPDDKPKGKPKGRPKGKPDDKPKGKLKGKQDDKPDDKPDEKPVNTDHMKYPSLWKANEAGIITCCCGAGELVLKRLLPDGWISELVNRVEKTAEAGELLNLPETVLERCPCSNSDRHIDIDSCNLLKAACREGSEDNYLYSPSVWDVQQDDLKHFQHHWVKGEPVIVRNVLEATSGLSWEPMVMHRACRQISHVQHGSLKDVVAVDCLDFCEVKVNLHEFFTGYTDGRYDRMGWPLVLKLKDWPPAKVFKDNLPRHAEEFLCSLPLKHYTHPVNGPLNLAVKLPQNCLKPDMGPKTYVASGFAQELGRGDSVTKLHCDMSDAVNILTHISEVPNMQPGIGNLKKKHAEQDLKELYSSVANKEEMMEILENSRQQVQNVETDDGALWDIFRREDIPKLESYIEKHHKEFRHLYCCPVSQVVHPIHDQNFYLTRYHIMKLKEEYGIEPWTFNQKLGDAVLIPVGCPHQVRNLKSCNKVALDFVSPENVSECLRLTKQYRLLPPNHFAKEDKLGVKKMIVHAVDKALRDLSGEKSPEPEEKKQNMRGPKKGAAKAVAKALKDLSPSEKKSSEAAEEEISNGIVNAIDKGLKDLPPSEEKSSEAKVEISNGIVSAMDKDLEHISSSEKKSTEEEGVKRPNIVRTYERRKKLGSEVTNAYIDRLEMEKM

SEQ ID NO: 9 - DNA, 2800 bp, Arabidopsis thaliana
  CDS (1)..(2640)
atggagggtgaagttgctactaacggagtgattctcaagcataatggtgtaaaggatatttctttagaaacttgttggccagagaagaagaaaccggttgaggcaacgagtcttagcagtggttcatcagacatagaagaagagattagtgtggaatgtcctaagcgagtggctaatcaaagacggaaacggtctaaagctgatgagattaaaacgaaatcttcaagaaagaggaaatgtgatgatgagaacaagtgtgaagagaatgagaagaagcagaggagctctgttaaaaagagagcaactacatggaaagaagaagaagttgttgttgatgatgaaaagaaatgcgaacaacaactccaactagttccttccagcaaggcaacatctcgaagcaggagcaagaaatcagtcagtgtggatacttggttggttaacaacgagattgatgttagcgctttgagttcgcgttctgagtctgaactttcggattcttatctgaaaaccgagtactttaatgactgcagaagcatgacaaggagtttaaaggcaaatttgggagagcttgcaatttgccatcaatgctctaaaggggaaagaagatatcttttcatttgcaccttttgtgaagtgaggttgtattgttttccatgcataaagaaatggtatccccatttgtccacggatgatatccttgaaaaatgtcccttttgccgaggaacttgcaactgctgcacatgtttgcactctagtggtttaatcgagacatctaagagaaagctcgataaatacgaaagattttatcatcttcgcttcttgattgtggcgatgcttcctttcctgaaaaagttatgcaaagcacaagatcaagaaatcgaaaccgaggctaaggttcaagattcaatggcttctcaagttgatatatccgagagtctatgctcaaatgaagagcgtgtcttctgtaaccactgtgcaacatcaattgttgacttgcatcgaagctgtccaaagtgttcatatgaattgtgtctgaactgttgccaagagatccgtggaggttggctttctgaccgcccggaatgtcagctacaattcgagtacagagggacccggtatatacatggcgaagctgcagaaccgagctcttcttctgtttccgaggatgaaactaaaactccatccatcaagtggaatgctgatgaaaatggaagcatacggtgtgcgccaaaagagctaggaggttgcggggactctgtgctggagcttaagcgaatcttaccagtgacttggatgtcagatttggagcaaaaggcagaaacattcttagcctcttatagtatcaaaccgccaatgtcatattgtagatgttcttctgatatgagtagtatgaagaggaaggcagcttcgagggacggatctagtgacaattacctttattctcctgattctttggatgtcctgaagcaagaagaacttctgcatttccaagagcattggtccaaaggtgaaccagtgattgttcgaaatgctcttaacaacacagctggtttaagctgggagccaatggtgatgtggcgggctttatgtgagaatgttgattcagcaattagctctaatatgtctgatgtcaaagctatcgattgtttagctaattgtgaggtgaagataaatactctatgtttctttgaaggatatagcaaaggaagaacatatgaaaacttctggcctgagatgctgaagctgaaggattggcctccttcagacaagtttgaaaaccttttacctcgtcactgcgatgagttcatttccgcattaccatttcaagaatacagcgatcctagatcaggaattctcaacattgctacaaaacttcctgaaggacttcttaaaccagatcttggtccaaaaacttatgttgcatatgggacttcagatgagctcggtagaggagattcagtcactaagcttcactgtgatatgtcagatgctgttaatattctgatgcatactgctgaagtaacactaagtgaggagcaaaggtctgcaattgcagatttgaaacagaaacataagcaacagaatgagaaagagcttcaggagcaaaatggtttagaggaagaagaggttgtgagtgatgagattgtggtttatgatgaaacaagtggtgcactttgggacatctttaaaagagaagatgttcctaagcttgaagagtatctaaggaagcattgcatagaattcagacatacttattgctctcgtgttacaaaggtgtatcatccaatacatgatcagtcatatttcttaaccgtggagcataaaagaaaactcaaggcagaatttggtatggttacttggattgagccatggacatttgtgcaaaagctaggagaagcagtgtttattccagcaggttgtcctcatcaagttcggaatctcaagtcgtgcacaaaggtagctgttgattttgtttcccctgaaaacatcgatgagtgtctccgtttgactgatgagtttcgacaactccctaagaaccataaagccagagaagacaaacttgagataaaaaagatggtgatctatgcagttgaacaagctctgaaagaagtggagacattattgctagatcgcagctaaaagctctatagctttgttgttgtaggattaacagcagattttgtagaattgttaaagccatggctattgtagttggcttttgctgtgatatatgtatgtaaaagagacaagtgtctcttgaaaagaatgatttcctttttttcaaatgggattttgatgt

SEQ ID NO: 10 - protein, 879 aa, Arabidopsis thaliana
MEGEVATNGVILKHNGVKDISLETCWPEKKKPVEATSLSSGSSDIEEEISVECPKRVANQRRKRSKADEIKTKSSRKRKCDDENKCEENEKKQRSSVKKRATTWKEEEVVVDDEKKCEQQLQLVPSSKATSRSRSKKSVSVDTWLVNNEIDVSALSSRSESELSDSYLKTEYFNDCRSMTRSLKANLGELAICHQCSKGERRYLFICTFCEVRLYCFPCIKKWYPHLSTDDILEKCPFCRGTCNCCTCLHSSGLIETSKRKLDKYERFYHLRFLIVAMLPFLKKLCKAQDQEIETEAKVQDSMASQVDISESLCSNEERVFCNHCATSIVDLHRSCPKCSYELCLNCCQEIRGGWLSDRPECQLQFEYRGTRYIHGEAAEPSSSSVSEDETKTPSIKWNADENGSIRCAPKELGGCGDSVLELKRILPVTWMSDLEQKAETFLASYSIKPPMSYCRCSSDMSSMKRKAASRDGSSDNYLYSPDSLDVLKQEELLHFQEHWSKGEPVIVRNALNNTAGLSWEPMVMWRALCENVDSAISSNMSDVKAIDCLANCEVKINTLCFFEGYSKGRTYENFWPEMLKLKDWPPSDKFENLLPRHCDEFISALPFQEYSDPRSGILNIATKLPEGLLKPDLGPKTYVAYGTSDELGRGDSVTKLHCDMSDAVNILMHTAEVTLSEEQRSAIADLKQKHKQQNEKELQEQNGLEEEEVVSDEIVVYDETSGALWDIFKREDVPKLEEYLRKHCIEFRHTYCSRVTKVYHPIHDQSYFLTVEHKRKLKAEFGMVTWIEPWTFVQKLGEAVFIPAGCPHQVRNLKSCTKVAVDFVSPENIDECLRLTDEFRQLPKNHKAREDKLEIKKMVIYAVEQALKEVETLLLDRS

SEQ ID NO: 11 - DNA, 2652 bp, Arabidopsis thaliana
  CDS (1)..(2652)
atggattctggagttaaattggagcatatgaattgtttccaattatcttatcaatattcgtggacgactaggaagaagagaactctgaaaccattcatgtcaaaaggttctagccctagtagtagtagtgatagtaggaaacggaagctttcgagagctgaagatagcgatgattcagcggttaaacggaatgcgaaacgaaggagaaagatatgcaaagtagaagaatattatgaagatgatgattgcatattaagtgattgggttcagaggaatactgcgaaaaggattgataagcgcaacgaagaagttgaagttatggttaagatagagtcaggtgatgattgcacaataggtaagtggttttctgatgttagtagtaaaaggaaagataaacgacaagtagaagttgatgaagatgaggaatgggaagaagaagttacactgtgttctaagatcaaggcaacgtcgtcgcgaagcagaacccatagtttaagtgctaacagtccagaaaatgttacagatgttattagtccttgtcgttcacggtctccagcttctaatgtatcagattccattcagaaaaatgactgcaccagtagtagaaaacagagtggcccaatttgtcatcagtgcttgaaaggggaaaggataacacttctcatttgtagtgaatgtgagaagacaatgttttgtcttcaatgtataaggaaatggtatccaaatctatctgaggatgatgttgttgagaaatgtcctttatgccgtcaaaattgtaattgtagcaaatgcttgcatttgaatggtttaattgagacatcgaagagggaactcgcgaaatctgaaagacgtcatcatctccagtatttgattacgttgatgcttccttttctgaataagttatccatattccagaagctagagattgaatttgaggcaactgttcaaggaaaactgccttctgaagttgaaataactgcggctataagctacactgatgaacgtgtatactgtgatcattgtgcaacttcaattgttgacttgcatcgaagctgtccaaagtgctcttatgaactttgtttgaagtgctgtcaagagattcgtgaaggatcgctttctgaacgccctgaaatgaagttccattatgttgatagaggacatcgatatatgcatggtttagatgctgcggaaccgagcttgtcttccacttttgaagacgaagaagctaacccatctgacgctaagtggagccttggtgaaaatggaagcatcacttgtgcaccagaaaagctaggtggttgtggtgaacggatgctagagcttaggcggatcctaccactcacgtggatgtcagatttagagcacaaagcagagactttcttatcatcatacaatataagccctagaatgttgaactgtaggtgttcttctttggagacagagctgacaaggaaatcagcttcgaggacaacatcaagtgacaactaccttttctgtcctgaatctctcggtgtcttgaaggaagaagagcttcttcattttcaagagcattgggcaaaaggcgaaccagtaatcgttaggaacgctcttgacaacacacctggtttaagctgggagccgatggttatgtggcgggctttatgcgaaaatgtgaattcaacatcaagctctgagatgtcccaagtcaaagcaattgattgcttagctaattgtgaggtggagatcaatactcgtcagttctttgaaggttatagcaaaggaagaacatatgaaaatttctggcctgagatgttgaagcttaaggactggcctccttctgataagtttgaagatcttctacctcgtcactgtgatgagttcatatccgcgttacctttccaggaatatagtgatcctagaactggaattcttaacattgcaacaaagcttcctgaaggatttatcaaaccagatttaggtccaaaaacttacatcgcctatgggattccagatgagcttggtagaggcgattccgtgactaagcttcactgcgatatgtcagacgcggtgaatattctaacgcatacggccgaagtgaccctaagtcaagaacaaatatcctcagtcaaagcactgaaacagaaacacaagttacagaataaggtcgataaacagagtactgaagactgtaacgaaaaggaagaagaagaagaagaagaattgaacatgccagagatttcgagcaatgaaaatgaagaaacgggcagtgctctttgggacatatttaggagagaagacgttcccaagttagaagagtatctaagaaagcattgcaaagaatttagacacacttattgtagtccagttacaaaggtttatcatccgatacatgaccaatcatgctatttaaccttagagcacaaaagaaaactcaaggcggaatatgggatcgagccatggacatttgtgcaaaagctaggtgaagcggtgtttattcccgcgggttgtcctcatcaagttcggaatctaaagtcgtgcacaaaagtcgcagttgactttgtgtcaccagagaacatccatgagtgtctgcgtttgaccgaagagtttcgccaacttcccaaaaaccacaaggccagagaggacaaactcgaggcaagtcttttatctctttga

SEQ ID NO: 12 - protein, 883 aa, Arabidopsis thaliana
MDSGVKLEHMNCFQLSYQYSWTTRKKRTLKPFMSKGSSPSSSSDSRKRKLSRAEDSDDSAVKRNAKRRRKICKVEEYYEDDDCILSDWVQRNTAKRIDKRNEEVEVMVKIESGDDCTIGKWFSDVSSKRKDKRQVEVDEDEEWEEEVTLCSKIKATSSRSRTHSLSANSPENVTDVISPCRSRSPASNVSDSIQKNDCTSSRKQSGPICHQCLKGERITLLICSECEKTMFCLQCIRKWYPNLSEDDVVEKCPLCRQNCNCSKCLHLNGLIETSKRELAKSERRHHLQYLITLMLPFLNKLSIFQKLEIEFEATVQGKLPSEVEITAAISYTDERVYCDHCATSIVDLHRSCPKCSYELCLKCCQEIREGSLSERPEMKFHYVDRGHRYMHGLDAAEPSLSSTFEDEEANPSDAKWSLGENGSITCAPEKLGGCGERMLELRRILPLTWMSDLEHKAETFLSSYNISPRMLNCRCSSLETELTRKSASRTTSSDNYLFCPESLGVLKEEELLHFQEHWAKGEPVIVRNALDNTPGLSWEPMVMWRALCENVNSTSSSEMSQVKAIDCLANCEVEINTRQFFEGYSKGRTYENFWPEMLKLKDWPPSDKFEDLLPRHCDEFISALPFQEYSDPRTGILNIATKLPEGFIKPDLGPKTYIAYGIPDELGRGDSVTKLHCDMSDAVNILTHTAEVTLSQEQISSVKALKQKHKLQNKVDKQSTEDCNEKEEEEEEELNMPEISSNENEETGSALWDIFRREDVPKLEEYLRKHCKEFRHTYCSPVTKVYHPIHDQSCYLTLEHKRKLKAEYGIEPWTFVQKLGEAVFIPAGCPHQVRNLKSCTKVAVDFVSPENIHECLRLTEEFRQLPKNHKAREDKLEASLLSL

SEQ ID NO: 13 - DNA, 2187 bp, Arabidopsis thaliana
  CDS (1)..(2187)
atgtcggagaacgaaatcgtccctgacgagtttcgttgcaaccgctctgatggtaagcaatggcggtgcaagagacgagctttagaggggaaaaagatgtgtgagagtcatcactcgcagcaaagcctaaagcgaagtaagcagaaagttgcagagtcttctaagcttgtcagatcaagaagaggaggaggagatgaagtggcgtcttcagagatcgagccaaacgaaagcagaattaggtctaagagattggggaaatcgaagaggaagagagtgatgggtgaagcagaggctatggatgaagcagtgaagaagatgaagttgaagagaggagatttgcagttggatttgataaggatggtgttgaagagagaagttgagaagaggaagagattaccaaatagtaataataagaagaagagtaatggagggtttagtgaatttgttggagaagagttaacgagggttcttcctaatggtattatggcaatttctccaccttctcctactactagtaatgtgtcttctccttgtgatgttaaagttggggaagagccaatttcgatgattaaaaggaggtttaggtctaagaacattgaacctttgccaattgggaaaatgcaggattctcagagtgtcaggagtgatattgacagggttttgcatctacattatgcggtgtgcatgctacttccagtactaaaagaaatcaatgcggaacacaaagtggaggtggaaaatgacgcagaaaagaaagtggatttgcaaagaatgtgcacacgcagttcctctgttctcaggctaaattctgaccaagatcagagtcaagagagcttatctagaaaggttggatcggttaaatgctcgaatggtataaaatctccaaaagtgttgctggattttcatcaaaacaatctggaacattttcagacacactggagtaaaggccatcctgtaatagttcgtagtgtgataaagagtggttcaagcctgaattgggatccagtagccttgttctgtcactatcttatgaacagaaacaacaaaaccggtaatactactgattgtatggattggtttgaggtagaaattggtgtcaagcaattttttttggggtctttgagaggaaaggctgagactaatacttgtcaagaaaggctgaagctggagggatggctttcatcttcattgtttaaagaacagttcccaaatcattacgctgaaatactgaatattttaccaatctcccattacatggatccaaagcgcggtctactaaatattgcagccaacctacctgacactgtacaaccacccgattttggcccatgcctcaatatttcatacaggagtggtgaagaatatgcacagcctgattctgtgaagaagttaggttttgaaacttgtgacatggttgatatcttgttatatgtcacagaaacacctgtatccacaaaccagatttgtaggataagaaagctaatgaaaaacatcggaagagtaagatctaaaaatccggcaaaggggagggaaagcagatttgataagggaaagaaacgagataggttggatgactattccagttctgattcagaatcttcacaacactgtttaggcgctaaatgcagaggcagtgagtttgagggagaggaaagagaaagttgcaactactcttgtgaagaagagagcctaagcaacacttatggtgcccagtgggatgtattccaaaaacaagatgtttctaaacttcttgagtatattaagaaccactctctggagctagaatccatggattccagcaaaaaaaaggtgagtcatccattacttgagcagagttactatcttgatgagtatcacaaagcaaggcttaaggaagaatttgacgttgaaccatggagttttgatcaatgtgttggggaagcagtcatcctccctgctggatgtccataccaaattagaaagaataagtcttgtgtaaatgcggttctgaagtttctgtcacctgagcacgttagcgaatctattaaacgagtgaaggagctcaatcaacttcctcagagcgtcaaatcgaaagcaaataagattgaggtgaagaaaatggcgattcataaaatcagcgaagctgtaaaggaaattcgggaactcacatcttcggattcaactggtgcattgagattatataactag

SEQ ID NO: 14 - protein, 728 aa, Arabidopsis thaliana
MSENEIVPDEFRCNRSDGKQWRCKRRALEGKKMCESHHSQQSLKRSKQKVAESSKLVRSRRGGGDEVASSEIEPNESRIRSKRLGKSKRKRVMGEAEAMDEAVKKMKLKRGDLQLDLIRMVLKREVEKRKRLPNSNNKKKSNGGFSEFVGEELTRVLPNGIMAISPPSPTTSNVSSPCDVKVGEEPISMIKRRFRSKNIEPLPIGKMQDSQSVRSDIDRVLHLHYAVCMLLPVLKEINAEHKVEVENDAEKKVDLQRMCTRSSSVLRLNSDQDQSQESLSRKVGSVKCSNGIKSPKVLLDFHQNNLEHFQTHWSKGHPVIVRSVIKSGSSLNWDPVALFCHYLMNRNNKTGNTTDCMDWFEVEIGVKQFFLGSLRGKAETNTCQERLKLEGWLSSSLFKEQFPNHYAEILNILPISHYMDPKRGLLNIAANLPDTVQPPDFGPCLNISYRSGEEYAQPDSVKKLGFETCDMVDILLYVTETPVSTNQICRIRKLMKNIGRVRSKNPAKGRESRFDKGKKRDRLDDYSSSDSESSQHCLGAKCRGSEFEGEERESCNYSCEEESLSNTYGAQWDVFQKQDVSKLLEYIKNHSLELESMDSSKKKVSHPLLEQSYYLDEYHKARLKEEFDVEPWSFDQCVGEAVILPAGCPYQIRKNKSCVNAVLKFLSPEHVSESIKRVKELNQLPQSVKSKANKIEVKKMAIHKISEAVKEIRELTSSDSTGALRLYN

SEQ ID NO: 15 - DNA, 2281 bp, Arabidopsis thaliana
  CDS (727)..(2091)
cctccaagtgaaaaagatacagatgtcaagcttaagcagctgcagtatctgttagtcaaagttctcccagttcttaaggatatttatacggagcagaaccgtgaactagagattgaatcaacaattagaggacaccctgtgacagaagctaatatcaagaggtgcaaacttgacccaagcgaacgcatatactgtgatctctgccgcacatccattgccaattttcacagaagctgtccgaacaaaaattgttcagtcgatatatgtctttcttgctgcaaggaactaagtgagggcttccatcaagagagagatgggaagaaaaatgcagaagggaaaggatatgaatgtcgaatcccagcaggtcaaggaaaagactcggacgcatatgttccactgcatttctcgacttggaagcttaactcagacagtagcattccatgccctccaaaagagtgtggtggttgtggtacttcaacactggagttgagacgcttatggaaaagagattgggttgaaaaattaataacgaatgccgagaaatgtactctgaattttaggccaacagatgtggatattgttcatgaatgttcctcatgctctaccaattctgattccattagaaggcaggcagcttttaggaagaatgctcatgataatttcttatactccccaaatgctgttgatctggctgaagacgatattgctcattttcagtttcattggatgaaggcagaacctgtgatagtcagaaatgttctcgagaagacatctggactaagttgggaaccaatggttatgtggagggcttgtagggaaatggatccaaagcgtaaaggtacagaagaagagacaacaaaagtgaaagctttggattgcttggactggtgtgaggttgaaataaatctgcatcagttttttgagggctacttagaaggccgcatgcataaaaacggttggccagaaatgttgaaattgaaggactggcctccctcagatttatttgaaaagcgccttccaaggcataatgctgagtttattgccgcattgcctttctttgattacactgacccaaagtctggtatcctaaatctcgcaacaagatttccggaaggatccttgaagccagatcttggacccaagacatacattgcgtacggtttccatgaagagcttaatagaggagattcggtgacaaaacttcattgtgacatttctgacgcggtcaatgtgttgacacacacagctaaagtggaaatccctcccgtcaaataccaaaacataaaagtacatcagaaaaaatatgcagaagccatgttgcagaaacaacaatacagtggtcaagtgaaagaagccagcgaacttgaaaacaagtcaatgaaagaagtggatgaaagtaaaaaggatttaaaagacaaggcagctaacgaagaacaatcaaataacagttcaagaccgtcgggctcaggagaagctgagaaagtaattatttcaaaagaggataatcccacacaacctgctgtgagtacaagtgtggaatccatacaagaacagaagctggatgctccaaaagaaactgatggcaataccaatgagaggtcaaaggctgtgcatggtggtgctgtctgggatatctttcgaagagaggatgttccaaaacttattcagtttttgaaaaggcacgagcatgagtttcgtcacttcaataacgaacccctggaatccgttattcacccaattcatgaccagactatgttcttgagtgatagccagaagaaacagctgaaagaagaatttgatatagaaccatggacctttgagcaacacctcggcgaagcagtcttcatacctgcaggttgtcctcaccaagtgaggaatagacagtcttgcataaaggtggcactagactttgtggctcctgaaagcgtcgaagaatgccttaggctaacacaggagttccggagattgcctaaagaccacagttctagcgaggataaattggagcttaagaaaattgcactgtatgctgcgagttcagccataagagaggtaaaagggctaatgcaaagctcccgacgcagtgatacctaacaaatgacaaggaaaagttcccaagtttattttatccctaaactattcctacgcagttgacttgttgtaacttcctctactttaaaatagtagagttggatagagtgtaatgtataattaccatgattaccgagtagtagaattatgtaaaagaatctgttaacttcaagttttaatcaacatgttgctt

SEQ ID NO: 16 - protein, 454 aa, Arabidopsis thaliana
MKAEPVIVRNVLEKTSGLSWEPMVMWRACREMDPKRKGTEEETTKVKALDCLDWCEVEINLHQFFEGYLEGRMHKNGWPEMLKLKDWPPSDLFEKRLPRHNAEFIAALPFFDYTDPKSGILNLATRFPEGSLKPDLGPKTYIAYGFHEELNRGDSVTKLHCDISDAVNVLTHTAKVEIPPVKYQNIKVHQKKYAEAMLQKQQYSGQVKEASELENKSMKEVDESKKDLKDKAANEEQSNNSSRPSGSGEAEKVIISKEDNPTQPAVSTSVESIQEQKLDAPKETDGNTNERSKAVHGGAVWDIFRREDVPKLIQFLKRHEHEFRHFNNEPLESVIHPIHDQTMFLSDSQKKQLKEEFDIEPWTFEQHLGEAVFIPAGCPHQVRNRQSCIKVALDFVAPESVEECLRLTQEFRRLPKDHSSSEDKLELKKIALYAASSAIREVKGLMQSSRRSDT

SEQ ID NO: 17 - DNA, 22 bp, Artificial sequence
  misc_feature (1)..(22): Primer
atggattctgtggaggaagaag

SEQ ID NO: 18 - DNA, 23 bp, Artificial sequence
  misc_feature (1)..(23): Primer
ctacatcttctccatttctaatc

SEQ ID NO: 19 - DNA, 1776 bp, Arabidopsis thaliana
  CDS (1)..(1176)
atgggtatgtggctgttatttcttcgtacaacatgtttagataagaagaaggaagtatggtttattgtcaatggcgtaccgatccggtattctctcgaagaatttgcacttatgtcaggattatactgccataattatcccaaacccttggacagcttgggctgtaccacttttgctggcaagatgtttggactcggagcaacagttcagtatcttgatgtggagaataagttattgtctatgaaaaaaccttctgatgctcgtctgagggtagctgtactatattttttatgtagtgtaatcgttggaaagggtaagacaggaccaaacgcaccaaatgtggagaagttcttccttagggctgtggctgatctagagttgtgcaaaacatttccgtggggaagatttgcatttgaaaaaaatgtgaaagacattttctatctgatgaaaaagtgcaatggagtagttggtccacaaaaggtgtttcctagttttgttatgcctttggagtatctagcatttgaggcgatcccagttctcagggaaaatttctgcgaagatattgaatccgcagatcctcagtgtccccggatgtgtaaaatgaagtttaaatcaagcactatgaaagggtttccaatgtcagatgtgtatgacaaactcggtacaactaaggacattcagagtatcttggctccaactcctgatgagaagctacttttggaaagaattatggataaagagtgtggagtgaatgatgtcgatgatctaatagctgatggttggaagaaacgtctagttgatgaggagaggactatatgttttgaaccgttgttcaatgaagatgtagcacaccggagctttgtggctaataaagctccgtctactgtggtaaaagctccaagaaaagccgcagtggaaaagaaaggcaagggaaaggctgctgcagctctgactagtccaagtgatgaaggtttgactagtccaagtgatgaaggtttgactgaggttgtaaacgaaatgaagaatttgatggagaatggatttaagtccatgaacaagaggatgaaagatttcagtaagaagtatgaagagcaagataaaagactgaaactgttggaagctgcaatcaaatcaattcaatcaggcattagaactgaagacgcttgtggttcaaaggagattgatgataaagaaaacgagctggaggaagggagtgatgcagagactgagatagacaaagaggtggctcaaggtgataaggagagagaggttggagaaacagagactgagatagacaaagaggtggttcaatgtgacagtgataaggaggtggctgaaagtgagattggggtggctgaaagtgagaaggacaaagaggtgcctcaagatgatgagatggatggaggtaaggtggctgagagtgatggagagatggatggagagaaggacaaagaggtgcctgaagatgatgagatggatggagagaaggagaaagaggtggctgagccaagtgagattgggatgcctgaaagtgagaaggacatagaggtggctgatagtgagaaggagaaagaggtgcctcaagatgctaaggtggctgagccaagtaagaagcgaggaaaggcacatgaggatggagatgatcctagtgaagaggtagttaaaaagcctaaggtggtcaagaagctggcagagtcgaggacggatgctaagccggtgtatcggagtcctacaatgacgaggtataggaggaaaaagacaaagaagaatgtttaa

SEQ ID NO: 20 - protein, 392 aa, Arabidopsis thaliana
MGMWLLFLRTTCLDKKKEVWFIVNGVPIRYSLEEFALMSGLYCHNYPKPLDSLGCTTFAGKMFGLGATVQYLDVENKLLSMKKPSDARLRVAVLYFLCSVIVGKGKTGPNAPNVEKFFLRAVADLELCKTFPWGRFAFEKNVKDIFYLMKKCNGVVGPQKVFPSFVMPLEYLAFEAIPVLRENFCEDIESADPQCPRMCKMKFKSSTMKGFPMSDVYDKLGTTKDIQSILAPTPDEKLLLERIMDKECGVNDVDDLIADGWKKRLVDEERTICFEPLFNEDVAHRSFVANKAPSTVVKAPRKAAVEKKGKGKAAAALTSPSDEGLTSPSDEGLTEVVNEMKNLMENGFKSMNKRMKDFSKKYEEQDKRLKLLEAAIKSIQSGIRTEDACGSK

SEQ ID NO: 21 - DNA, 2118 bp, Arabidopsis thaliana
  CDS (1)..(2118)
atgccgcctaagacgcgtggaggaggtcaagggaaaagaaaggagatagaagcgccggcgccagcgaagacagagaaagttaaggcgccggctgagaaagtgaaggagaaggtgccggcgaagaaagcgaaggttcaggcgccggcgaagaaagagaaggttcaggcgccggcgaagaaagagaaggttcaggcgccggcgaagaaagcgaaggttcaggcgacggcgaagacgactgcgacggcacaaacgactgcgacggcgatggcaacgacagcggctccaacgacaacggctccaacgacggctccaacgacggagagcccgatgcttgatgattctacgttttatgatgctctgaagcatattccggctgaagaaactcaagagaatatgcaaactgatgaggtggaagatgaaaatgaaaaagaagaaggaagtgaaaaagaagaatcagggagtagtagccaaaccttgggctccgattccgattcagaggagacggagacaaacaaagaagtcgcgtgtgctaatcccgtggaagaggcggagagacaagatgacggcctagccgttatcgaggaggaggaggagaggagctccgcgagcgacgaggacgtcaatgtggaaaagtctgtggaggatgagggagacgaggacgagagagacgaggacgtgatagtccaagtggaaaaacccgtggaggagaggaccatagacgaggacatcgcaaatgtggacgagagaaacgaggacgtgatagtccaagtggaaaaacccgtggaggagaggaccatagccgaggacatcgcaaatgtggatatggaggaagcgatggcaatgcagccacttggtatgtacttcccggcgtcggagtataccaagaagatgaagttagcaacgaggtgttatatctcggaggtgttgaagaccttcgctgacttggaacatcctctaacgaatgttgaaaagaattattttatggagcatccgagtttcaagcacatctaccacctgccttccggatatacccacaagttaatggggatgtggatgctttttcttcgaacggcatctattgagaagaagaaggaggtttggttcgttgttaatggagttcccatccgctatggtattagggagcatgctttgatctctggtttcaactgcaaggcttatccagctaattatcagagtgctggtaatatgaacttcgccaacaggtacttcaaaaccggggtaattagacgtgaagacgtgaaaaccaagctaatggagatggaaccggctagatcaaaggataggttgcggatggcggtcctctattttctaacaagcatcattgccgtgcctactaagactggagaaagggctagtccaattgatgatttctgtgttagggctgcaagtgatcttacgttttgtaagacatttccatgggggagatattcatttgagtacatgttaaaatcgatctcacacacattggatcattttaacggtgtcgtcccgaacactcagtcaccatggcctgttcccggattctgtgtgccgcttgagtttttagcatttgaggccattccatcacttagggaaagattcatagaagaaaaagagggttcacatgccggttgtccaaggatgtgcaaggtgagtttcaagagaaccgagatgaaagggtttacccttgagcaaatcaaccatgtactcggaacaactgaggtcattgagagtataattagagagaaggctgaagaagtaccccttttggctgaaatcacgggagtagaggatgatgttgataagcacgatgttgtagttgatagttggatgaagcgtcttggtcaagggcgtgaaattagatttgaggaggtgtacaacgaggatgtgcatgcacgaatggaagccccaaatgaagaggaagttcccacagctgttggaccgggagacccgacgttagttgatgtaatggagaagctccattccatcaatgacaagctgaatgaagctttgttggcgcttatggaaatggaggaaaaacaagcaacgttcgaagcatttatggatgagatgaaagccaaggtaaatctgggtaataccggatatactgttccataa

SEQ ID NO: 22 - protein, 705 aa, Arabidopsis thaliana
MPPKTRGGGQGKRKEIEAPAPAKTEKVKAPAEKVKEKVPAKKAKVQAPAKKEKVQAPAKKEKVQAPAKKAKVQATAKTTATAQTTATAMATTAAPTTTAPTTAPTTESPMLDDSTFYDALKHIPAEETQENMQTDEVEDENEKEEGSEKEESGSSSQTLGSDSDSEETETNKEVACANPVEEAERQDDGLAVIEEEEERSSASDEDVNVEKSVEDEGDEDERDEDVIVQVEKPVEERTIDEDIANVDERNEDVIVQVEKPVEERTIAEDIANVDMEEAMAMQPLGMYFPASEYTKKMKLATRCYISEVLKTFADLEHPLTNVEKNYFMEHPSFKHIYHLPSGYTHKLMGMWMLFLRTASIEKKKEVWFVVNGVPIRYGIREHALISGFNCKAYPANYQSAGNMNFANRYFKTGVIRREDVKTKLMEMEPARSKDRLRMAVLYFLTSIIAVPTKTGERASPIDDFCVRAASDLTFCKTFPWGRYSFEYMLKSISHTLDHFNGVVPNTQSPWPVPGFCVPLEFLAFEAIPSLRERFIEEKEGSHAGCPRMCKVSFKRTEMKGFTLEQINHVLGTTEVIESIIREKAEEVPLLAEITGVEDDVDKHDVVVDSWMKRLGQGREIRFEEVYNEDVHARMEAPNEEEVPTAVGPGDPTLVDVMEKLHSINDKLNEALLALMEMEEKQATFEAFMDEMKAKVNLGNTGYTVP

SEQ ID NO: 23 - DNA, 2208 bp, Arabidopsis thaliana
  CDS (1)..(2208)
atggctcgtgttagagacggtattgctggccctgtatatgattcgacggagaagtcgtcgtccggtgaagtttcgacatcagaacaagttacttcagaaattgagaacgacggagatgccgccgacttggttccgaccaaaccagcaggtctgacagaaccagcagcacgagatgttgcggcgaatgatactacaaaagaaaccgctgaaattgaaaaggctttggaggaaccgcgtgatggtgatgaggcttctcctaaaggaaccgctgaaattgaaaaggctatggaggaaccgcgtgttggtgatgaggcttctcctaagggaaccgccgaaattgaagaggatcagacagggacaactttgaaacctctaattgacgctgtcattcaacaattcgaagaagcgaaagacgggaatggggaggagttggaggaggaggaaatggtgaatacaattccaaaagaaggggtagagaacgttaatcgtcaggatacttatgaggccgaggatgatgaggtttctgttaaagagacagaggaagatgaggctggcaatgatggtttggaggatgatgatttagattctcagccactgccgccacagacaatgcattttcctttttcagaatacggcaaagtgtgcaagataagcagtaggtgccaggtcacgcagacagttgaactgatagagaggaagtttaaagaagaagctgtatggttcaaaagacacgatcagttcaagcatatattccacatgcctcaggagcctaaccaccagacgcaaggcatgtgggtgcttatgctgcgcacagtgaagacagatttgctcgaggaggcttggtttgtggtaaatggagtacctattaggtattccattaaagagcatgcgttgttaagtgggtttgattgccacagttacccaaaagaaatgaatacaatggggaatattaactttgtgaagaggatatttaaaaaagaatctggggtaaaggttgtagatgttcttgctaagtgctcgaagatgaagcatggttcaaataggttgaagttagtgctgttgtacttcttggtcaaggtagtaaaagctggtgcaaagaatgatggaaacattgaagagtttctgttaaggattgttggcgatttgaatgcgtgcgagacgtttccgtggggccgttacatctttttggaatgtatggcaggaataaggaaaatgatgaagaacatgaatggtttcgtgaaaccaaaagctcaaccttgcttcagtggattcattgtgcctcttgagattctggcttatgaggctattccacagcttggactgaaatttagagtccctgtacgctccgctttgagtgactgtccaaggatgtgcaagcataagtttaaagaatgtagcatgaaaggtgtcccgttggaagttatatataaagagcttgggaatactaaggattttccaagcattttggtacctgcctatcatgagaaatatctgttgaaagatctcttagacgatgatgttgatgatgactgcggtccaatagatattgttattgacagttggagagagcgactattagtagagaagaacatgatatggtggaaaggaatgtgtgagatggacatttcttctcgatgtattgtaaatgagatttcggatgaggaagtccatgagattgagaatgaggtccccgagactgctgtccctcctcgattccctgatttagatacagttgtggcatctataacctcagtgacgcagatgatgaccaaaggctttgatgaaacaaaaaataagattgatgccattgatgtgagagtgcagtctattgagttatttgtggcagatctgaaggaaagggaacatgggaagcaaacagaggaggcaagtcaagatgggcatgcaacagacgatgacgtgttatttgcttcgccagatggttatgtgaccaccggaaacgagcaacaacgggatatagtgatcagtgaacgttctccagaggttgcagaaaacagtaataaggagacaaacacgacggagaaagaggtgaaaggaaaagcgaagaagaatggcgggggcaagaagaagcaggaggtgccacctgtaatagaaaccggaaagaagcaaacaaggggagcatcccgccttattacatcaccgtttgtggcggatgataagaagcgtaagaaaatgcgaaaggcagattga

SEQ ID NO: 24 - protein, 735 aa, Arabidopsis thaliana
MARVRDGIAGPVYDSTEKSSSGEVSTSEQVTSEIENDGDAADLVPTKPAGLTEPAARDVAANDTTKETAEIEKALEEPRDGDEASPKGTAEIEKAMEEPRVGDEASPKGTAEIEEDQTGTTLKPLIDAVIQQFEEAKDGNGEELEEEEMVNTIPKEGVENVNRQDTYEAEDDEVSVKETEEDEAGNDGLEDDDLDSQPLPPQTMHFPFSEYGKVCKISSRCQVTQTVELIERKFKEEAVWFKRHDQFKHIFHMPQEPNHQTQGMWVLMLRTVKTDLLEEAWFVVNGVPIRYSIKEHALLSGFDCHSYPKEMNTMGNINFVKRIFKKESGVKVVDVLAKCSKMKHGSNRLKLVLLYFLVKVVKAGAKNDGNIEEFLLRIVGDLNACETFPWGRYIFLECMAGIRKMMKNMNGFVKPKAQPCFSGFIVPLEILAYEAIPQLGLKFRVPVRSALSDCPRMCKHKFKECSMKGVPLEVIYKELGNTKDFPSILVPAYHEKYLLKDLLDDDVDDDCGPIDIVIDSWRERLLVEKNMIWWKGMCEMDISSRCIVNEISDEEVHEIENEVPETAVPPRFPDLDTVVASITSVTQMMTKGFDETKNKIDAIDVRVQSIELFVADLKEREHGKQTEEASQDGHATDDDVLFASPDGYVTTGNEQQRDIVISERSPEVAENSNKETNTTEKEVKGKAKKNGGGKKKQEVPPVIETGKKQTRGASRLITSPFVADDKKRKKMRKAD

SEQ ID NO: 25 - DNA, 1776 bp, Arabidopsis thaliana; identical to SEQ ID NO: 19
  CDS (1)..(1176)

SEQ ID NO: 26 - protein, 392 aa, Arabidopsis thaliana; identical to SEQ ID NO: 20

SEQ ID NO: 27 - DNA, 1848 bp, Arabidopsis thaliana
  CDS (1)..(1848)
atggctcgaacaaagaacgcaggtgtgccgttggcggcggaggtagtttcacagacaatcaatgacgaagtagtagtagcgtcggctgctgaagtggattctgaagcaacaaatctaatctctaacgacgatagagcggattctgatgaggaaaccgaagctcttcaacctcttaaaatgtatttcggtccgagtgattatacaaagccattcaagattacagcaaagtgttatcttcataaggcagtcggattattggagagtcatcttgaagagtctgagttgaagtggtttttggagcacccacaattcaaacacttcttccacatgcataaggatccaaatcataaggtgatgggtatgtggctgttatttattcgtacaacatgtttagataagaaaggaagtatggtttattgtcaatggcgtaccgatccgatgtttggacccggagcaacaattcagtatcctgatgtggagaaaaagttattgtctatgaaaaaaccttctgaagctcgtctgagagtagttgtgctatacttcttatgtaatcgttggaaaggggttgtggctgatctagagttgtgcaaaacatttccgtggggaaaaaatgcatttgaagaaaattatttagcattcgaggcgattccagttctcaggaaaaatttctgcgaagatattgaatccgcagatcctcagtgtccccggatgtgtaaaatgaagtttaaatcaagcactatgaaagggtttccaatgtcagatgtgtatgacaaactcggtacaactaagagtatcttggctccaactcctgatgagaacctacttttgaaaagaattatggataaggagtgtggagtgaatgatgtcgatgatctaatagctgatggctggaagaaacgtctagttgatgaggagaggactatatgttttgaaccgttgttcaatgaagatgtagcacaccaaagctttgtggctaataatgctccgtctactgtggtacaagctccaagaaaagccgcagtggaaaaaaaaggcaagggaaagactgctgcagctctgactagtccaagtgatgaaggtttgactgaggttgtaaacgaaatgaagaatttgatggagaatggatttaagtccatgaacaagaggatgacaaatttcagtaagaagtatgaagagcaagataaaagactcaaactgatggaaactgcaatcaaatcaattcaatcaagcactggaactgatgatgcttatggttcaaaggagattgatgatagagaaaacgagctggaagaagggagtgatgcaaatggtggtgataatgagagagaggttagagaaaaagagactgagatagacaaagaggtggctcaaggtgataatgagagagaggttggagaaaaagagactgagatagacaaagaggtgggtcaaggtgacagtgatatatttgatggtaacaaagacatggagttgaataaagaggtggctgaaagtacaattggggtggctgaaagtgagaaggacaaagaggtgactgaaagtgagaaggacaaagaggtggctgaaagtgagattggggtgcctgaaagtgagaaggacatagaggtggctgatagtgagaaggacaaagaggtgcctcaagatgatgagatggatggaggtaaggtgactgagccaagtaagaagcgaggaaagtcacacgatgatggagatgatcctagtgaagggtgcgttaaaaagccaaaggtggtaaagaaggtggcaaagtcgaggacggatgctaagccggtgtatcggagtcctatacagacgaggtatgcgaggaaaaagacgaagaagaatgtttaa

SEQ ID NO: 28 - protein, 615 aa, Arabidopsis thaliana
MARTKNAGVPLAAEVVSQTINDEVVVASAAEVDSEATNLISNDDRADSDEETEALQPLKMYFGPSDYTKPFKITAKCYLHKAVGLLESHLEESELKWFLEHPQFKHFFHMHKDPNHKVMGMWLLFIRTTCLDKKGSMVYCQWRTDPMFGPGATIQYPDVEKKLLSMKKPSEARLRVVVLYFLCNRWKGVVADLELCKTFPWGKNAFEENYLAFEAIPVLRKNFCEDIESADPQCPRMCKMKFKSSTMKGFPMSDVYDKLGTTKSILAPTPDENLLLKRIMDKECGVNDVDDLIADGWKKRLVDEERTICFEPLFNEDVAHQSFVANNAPSTVVQAPRKAAVEKKGKGKTAAALTSPSDEGLTEVVNEMKNLMENGFKSMNKRMTNFSKKYEEQDKRLKLMETAIKSIQSSTGTDDAYGSKEIDDRENELEEGSDANGGDNEREVREKETEIDKEVAQGDNEREVGEKETEIDKEVGQGDSDIFDGNKDMELNKEVAESTIGVAESEKDKEVTESEKDKEVAESEIGVPESEKDIEVADSEKDKEVPQDDEMDGGKVTEPSKKRGKSHDDGDDPSEGCVKKPKVVKKVAKSRTDAKPVYRSPIQTRYARKKTKKNV

SEQ ID NO: 29 - DNA, 1557 bp, Arabidopsis thaliana
  CDS (1)..(1557)
atggctcgaacaaagaacgcaggtgtgccattggcggcagaggtggtggtttcacagacaatcaatgacgaagtagtagtagcatcggctgctgaaaagttcttccttagggctgtggctgatctagagttgtgcaaaacatttccgtggggaagatttgcatttgaagaaaatgtgaaagacattttctatttgattaaaaagtgcaatgaagtagttggtccacaaaaggtgtttcctagttttgttatgcctttggagtatctagcatttgaggcgatcccagttctcagaaaaattttttgcgaagatattgaatccgcagatcctcagtgttcccggatgtgtaaaaggaagtttaaatcaagcactatgaaagggtttccaatgtcagatgtgtatgacaaactcggtacaactaaggacattcagagtatcttggcttcaactcctgatgagaagctacttttggaaagaattatggataaggagtgtgaagtgaatgatgtcgatgatctaatagctgatggctggaagaaacgtctagttgatgaggagaggactatatgttttgaaccgttgctcaatgaagatgtagcacaccggagctttgtggctaataaagctttgtctactgtggtaaaagctccaagaaaagccgcagtggaaaagaaaggcaagggaaaggctgctgcagctctgactagtccaagtgatggaggtttgactgaggttgtaaacgaaatgaagaatttgatggagaatggatttaagtccatgaacaagaggatgaaagatttctgtaagaagtatgaagagcaagataaaagactgaaactgatggaagctgcaatcaaatcaattcaatcaggcattggaactgaagacgcttgtggttcaaaggagattgatgataaagaaaacgagctggaggaagggagtgatgcagagactgagatagacaaagaggtggctcaaggtgataaggagagagaggttggagaaacagagactcagatagacaaagaggtggctcaaggtgacagtgataaggaggtggctgaaagtgagaaggacaaagtggtggctgaaagtgagaaggagaaagaggtggctgaaagtgagattggggtggctgaaagtgagaaggacaaagaggtgcctcaagatgatgagatggatggaggtaaggtggctgagagtgatggagagatggatggagagaaggacaaagaggtgcctcaagatgatgagatggatggagagaaggagaaagaggtggctgagccaagtgagattggggtgcctgaaagtgagaaggacatagaggtggctgatagtgagaaggagaaagaggtgcctcaagatgctaaggtggctgagccaagtaagaagcgaggaaaggcacatgaggatggagatgatcctagtaaagagggagttaaaaagccaaaggtggtcaagaagctggcagagtcgaggacggatgctaagccggtgtatcggagtcctatacagacgaggtataggagaaaaaagacaaagaagaatgtttaa

SEQ ID NO: 30 - protein, 518 aa, Arabidopsis thaliana
MARTKNAGVPLAAEVVVSQTINDEVVVASAAEKFFLRAVADLELCKTFPWGRFAFEENVKDIFYLIKKCNEVVGPQKVFPSFVMPLEYLAFEAIPVLRKIFCEDIESADPQCSRMCKRKFKSSTMKGFPMSDVYDKLGTTKDIQSILASTPDEKLLLERIMDKECEVNDVDDLIADGWKKRLVDEERTICFEPLLNEDVAHRSFVANKALSTVVKAPRKAAVEKKGKGKAAAALTSPSDGGLTEVVNEMKNLMENGFKSMNKRMKDFCKKYEEQDKRLKLMEAAIKSIQSGIGTEDACGSKEIDDKENELEEGSDAETEIDKEVAQGDKEREVGETETQIDKEVAQGDSDKEVAESEKDKVVAESEKEKEVAESEIGVAESEKDKEVPQDDEMDGGKVAESDGEMDGEKDKEVPQDDEMDGEKEKEVAEPSEIGVPESEKDIEVADSEKEKEVPQDAKVAEPSKKRGKAHEDGDDPSKEGVKKPKVVKKLAESRTDAKPVYRSPIQTRYRRKKTKKNV

SEQ ID NO: 31 - DNA, 1200 bp, Arabidopsis thaliana
  CDS (1)..(1200)
atgggtatgtggctgttatttcttcgtacatcatgtttagagaagaaaagggaagtaccgtttattgttaatggcgttccgatccggtattctctcgaagaatttgcactcatgtcaggattatactgtcatagttataccaaacccttcaacagcttgggcagtaccacttttgtcggcaagagttttggacccagagcaacaattcaatatccagatgtggaggaaaagttaatgtctatgaaaaaaccttctgaggctcgtctaagagtagctgtgctctacttcttatgtagtgtaatcattggaaagggtaagacaggagaaaatgcaccaagtgtggagaagtttttccttagggttgtggctgatctagagttgtgcaaaatattttcgtgggggagatatgcatttgatgaaaatgtgaaaaacattttctatttgatggaccaatgcaatggagtagttggtccacaaaaggtgtttcctagttttgttatgcctttggagagtatcttgactccaactcctgatgagaaactacgtttggaaagaattatggatgtggagtgtggagtgaatgatgttgatgatgtaatagctgatggctggaagaaacgtcttgttgaagagcagaaggctatatgttttgaactgttgttcaatgaagatgtagcacaccatacatttgtggctaataaagctctgtctactgtggagagtgatgttagagaaaacgagctagatgaagggattgatgcaaatggtggtgataaggagagagaggttggagaaaaagagactgagatagacaaagaggtggctcaagatgacagtgatgtatttgatgaggtggatgaaaataagaatgatgtggatggtgataatagggagatggagaaggacaaagaggtggctggaagtgagattggggtgtgcagtggtaataaggagatggagaagggcaaagaggtggctgaaagtgagattgaggtgtgcggtggtaatatggagatggagaaagacaaagaggtgcctcaagatgatgagatggatggaggtggtaaagaaggtggtaaagaaggtggcaaagtcgaggacgaatgtgaagccggtgtatcagagtcctatacagacgagaaatgcgaggacaaagacgaagaagaatgtttaagcacttttaattgttggtttttttag

SEQ ID NO: 32 - protein, 399 aa, Arabidopsis thaliana
MGMWLLFLRTSCLEKKREVPFIVNGVPIRYSLEEFALMSGLYCHSYTKPFNSLGSTTFVGKSFGPRATIQYPDVEEKLMSMKKPSEARLRVAVLYFLCSVIIGKGKTGENAPSVEKFFLRVVADLELCKIFSWGRYAFDENVKNIFYLMDQCNGVVGPQKVFPSFVMPLESILTPTPDEKLRLERIMDVECGVNDVDDVIADGWKKRLVEEQKAICFELLFNEDVAHHTFVANKALSTVESDVRENELDEGIDANGGDKEREVGEKETEIDKEVAQDDSDVFDEVDENKNDVDGDNREMEKDKEVAGSEIGVCSGNKEMEKGKEVAESEIEVCGGNMEMEKDKEVPQDDEMDGGGKEGGKEGGKVEDECEAGVSESYTDEKCEDKDEEECLSTFNCWFF

SEQ ID NO: 33 - protein, 56 aa, Unknown
  Consensus sequence
  MISC_FEATURE (1)..(56): X = any natural amino acid
EPWXFXQXXGEAXXXPAGCPXQXXXXXSXXXXXXXFXXPEXXXEXXXXXXEXXXLP

SEQ ID NO: 34 - protein, 80 aa, Unknown
  Consensus sequence
  MISC_FEATURE (1)..(80): X = any natural amino acid
FKXXXXKGXXXXXXXXXLGXTXXXXSIXXXXXXEXXXXXXXXXXXXXXXXXXXDXXXXXWXXRXXXXXXXIXXXXXXXXD

SEQ ID NO: 35 - DNA, 21 bp, Artificial sequence
  misc_feature (1)..(21): Primer
tgacgccatttcgccttttca

SEQ ID NO: 36 - DNA, 23 bp, Artificial sequence
  misc_feature (1)..(23): Primer
caacttaatcgccttgcagcaca

SEQ ID NO: 37 - DNA, 27 bp, Artificial sequence
  misc_feature (1)..(27): Primer
cagaaatggataaatagccttgcttcc

SEQ ID NO: 38 - DNA, 21 bp, Artificial sequence
  misc_feature (1)..(21): Primer
agctggcgtaatagcgaagag

SEQ ID NO: 39 - DNA, 23 bp, Artificial sequence
  misc_feature (1)..(23): Primer
ccaatacattacactagcatctg

SEQ ID NO: 40 - DNA, 18 bp, Artificial sequence
  misc_feature (1)..(18): Primer
aatgctagagcagcttga

SEQ ID NO: 41 - DNA, 22 bp, Artificial sequence
  misc_feature (1)..(22): Primer
caatacattacactagcatctg

SEQ ID NO: 42 - DNA, 18 bp, Artificial sequence
  misc_feature (1)..(18): Primer
agaggcccgcaccgatcg

SEQ ID NO: 43 - DNA, 22 bp, Artificial sequence
  misc_feature (1)..(22): Primer
ctagcatctgaatttcataacc

SEQ ID NO: 44 - DNA, 21 bp, Artificial sequence
  misc_feature (1)..(21): Primer
gcttgagcttggatcagattg

SEQ ID NO: 45 - DNA, 16 bp, Artificial sequence
  misc_feature (1)..(16): n located at positions 1 and 11, each n is a, t, g, or c
  misc_feature (1)..(16): Primer
ngtcgaswganawgaa

SEQ ID NO: 46 - DNA, 16 bp, Artificial sequence
  misc_feature (1)..(16): n located at positions 5, 10 and 13, each n is a, t, g, or c
  misc_feature (1)..(16): Primer
wgtgnagwancanaga

SEQ ID NO: 47 - DNA, 16 bp, Artificial sequence
  misc_feature (1)..(16): n located at positions 5, 10 and 13, each n is a, t, g, or c
  misc_feature (1)..(16): Primer
sttgntastnctntgc

SEQ ID NO: 48 - DNA, 16 bp, Artificial sequence
  misc_feature (1)..(16): n located at positions 5, 10 and 13, each n is a, t, g, or c
  misc_feature (1)..(16): Primer
agwgnagwancanaga

SEQ ID NO: 49 - DNA, 16 bp, Artificial sequence
  misc_feature (1)..(16): n located at positions 1 and 11, each n is a, t, g, or c
  misc_feature (1)..(16): Primer
ntgcgaswganwagaa

SEQ ID NO: 50 - DNA, 16 bp, Artificial sequence
  misc_feature (1)..(16): n located at positions 1 and 11, each n is a, t, g, or c
  misc_feature (1)..(16): Primer
ntgcgaswgantagaa

SEQ ID NO: 51 - DNA, 17 bp, Artificial sequence
  misc_feature (9)..(9): n located at positions 9 is a, t, g, or c
  misc_feature (1)..(17): Primer
sstggstanatwatwct

SEQ ID NO: 52 - DNA, 31 bp, Artificial sequence
  misc_feature (1)..(31): Primer
atattaattaaggtaattaggtatcatatct

SEQ ID NO: 53 - DNA, 29 bp, Artificial sequence
  misc_feature (1)..(29): Primer
ataccatggggatctacgtaattcgccag

SEQ ID NO: 54 - DNA, 29 bp, Artificial sequence
  misc_feature (1)..(29): Primer
ataggtaccggtaattaggtatcatatct

SEQ ID NO: 55 - DNA, 29 bp, Artificial sequence
  misc_feature (1)..(29): Primer
atagtcgacggatctacgtaattcgccag

SEQ ID NO: 56 - DNA, 29 bp, Artificial sequence
  misc_feature (1)..(29): Primer
ataccatggggtaattaggtatcatatct

SEQ ID NO: 57 - DNA, 31 bp, Artificial sequence
  misc_feature (1)..(31): Primer
atattaattaaggatctacgtaattcgccag

SEQ ID NO: 58 - DNA, 21 bp, Artificial sequence
  misc_feature (1)..(21): Primer
atgaagcaaagctcatcggag

SEQ ID NO: 59 - DNA, 22 bp, Artificial sequence
  misc_feature (1)..(22): Primer
atggattctgtggaggaagaag

SEQ ID NO: 60 - DNA, 22 bp, Artificial sequence
  misc_feature (1)..(22): Primer
atgggtatgtggctgttatttc

SEQ ID NO: 61 - DNA, 21 bp, Artificial sequence
  misc_feature (1)..(21): Primer
tcattcttttgtgtagtcttc

SEQ ID NO: 62 - DNA, 23 bp, Artificial sequence
  misc_feature (1)..(23): Primer
ctacatcttctccatttctaatc

SEQ ID NO: 63 - DNA, 25 bp, Artificial sequence
  misc_feature (1)..(25): Primer
ttaaacattcttctttgtctttttc

SEQ ID NO: 64 - DNA, 621 bp, Arabidopsis thaliana
  CDS (1)..(621)
atggaaaccgtcgggcgtccacgtggcagacctcgaggttccaaaaacaaacctaaagctccaatctttgtcaccattgaccctcctatgagtccttacatcctcgaagtgccatccggaaacgatgtcgttgaagccctaaaccgtttctgccgcggtaaagccatcggcttttgcgtcctcagtggctcaggctccgttgctgatgtcactttgcgtcagccttctccggcagctcctggctcaaccattactttccacggaaagttcgatcttctctctgtctccgccactttcctccctcctctacctcctacctccttgtcccctcccgtctccaatttcttcaccgtctctctcgccggacctcaggggaaagtcatcggtggattcgtcgctggtcctctcgttgccgccggaactgtttacttcgtcgccactagtttcaagaacccttcctatcaccggttacctgctacggaggaagagcaaagaaactcggcggaaggggaagaggagggacaatcgccgccggtctctggaggtggtggagagtcgatgtacgtgggtggctctgatgtcatttgggatcccaacgccaaagctccatcgccgtactga

SEQ ID NO: 65 - protein, 206 aa, Arabidopsis thaliana
METVGRPRGRPRGSKNKPKAPIFVTIDPPMSPYILEVPSGNDVVEALNRFCRGKAIGFCVLSGSGSVADVTLRQPSPAAPGSTITFHGKFDLLSVSATFLPPLPPTSLSPPVSNFFTVSLAGPQGKVIGGFVAGPLVAAGTVYFVATSFKNPSYHRLPATEEEQRNSAEGEEEGQSPPVSGGGGESMYVGGSDVIWDPNAKAPSPY

SEQ ID NO: 66 - DNA, 1326 bp, Brassica napus
  CDS (279)..(1214)
cctcttacctttccccaaccttagagagagatcatttgacatatataagttacctttttctcttttcttggtgtttaatttagttctgttctcgccccttctttagctaatattggctcctcaaatctttaattttgacttcttgatctgagttcttgtttttatcttcacgctcttcctctcatcaatatatgagcgagaaggatcaagaatcaagaagttgatgtgtgccggcgaataaacagtggtgggatagagaactagtagatgcagcggcgatggaaggcggttacgagcaaggcggtggagctaattctagatacttccataacctcttcagacaggagattcaccatcaacagtttcaaccgcaaggcgggatcagcttgattgaccagcatcaccatcagcaacaacacgagcaccagcagcagcaaccgtcggatgattcaagagaatctgatcactcaaacaaagaccatcatcaaccgggtggaccagattcatcagaccgggctacatcaagctcagcaccagggaaacgtccacgtggacgtcctccaggatctaagaacaaagctaagccaccgatcatagtaacacgcgatagccccaatgcgcttagatctcacgttcttgaagtatctcccggagctgacatagttgagagtgtgtccacttacgctaggaggagagggagaggggtctccgttttaggaggaaacggcaccgtttctaacgtcactctccgtcagccagtcacttctggaaatggcgttggcgttggagccggaggagttgtgactttacatggaaggtttgagattctttcgttaacgggaaccgttttgccaccacctgcgccacctggggctggtggtctgtcgatttttctagccggagggcaaggtcaggtggttggaggagtcgtcgtggccccgcttgttgcatcagctccggttatactaatggctacttcgttctcaaatgcggttttcgagagactgcctatcgaggaggaagaggaagaaggcggtgatggacgaggaggaggaggaccaccgcagatgcagcaagctccatcagcatctccgccgtcgggagtgactggtcagggacagttaggacgtaatgtcggtggttatgggttttccgctgatcctcatttgcatggatggggagctggtacaccttcaagaccaccttttaattgaatcttatgtgttttaatcattttgtggagtcgtctttcatttgggatcttcggtaattattatttttagttgatatgcatatttgcgttttaatgtctaaaaaaaaaaaaaa

SEQ ID NO: 67 - protein, 311 aa, Brassica napus
MEGGYEQGGGANSRYFHNLFRQEIHHQQFQPQGGISLIDQHHHQQQHEHQQQQPSDDSRESDHSNKDHHQPGGPDSSDRATSSSAPGKRPRGRPPGSKNKAKPPIIVTRDSPNALRSHVLEVSPGADIVESVSTYARRRGRGVSVLGGNGTVSNVTLRQPVTSGNGVGVGAGGVVTLHGRFEILSLTGTVLPPPAPPGAGGLSIFLAGGQGQVVGGVVVAPLVASAPVILMATSFSNAVFERLPIEEEEEEGGDGRGGGGPPQMQQAPSASPPSGVTGQGQLGRNVGGYGFSADPHLHGWGAGTPSRPPFN

SEQ ID NO: 68 - DNA, 1165 bp, Brassica napus
  CDS (118)..(960)
gctatctcttacattaaatctaaacctaaatcattagaatccctaattacgttttaaaaatcccaactccctttttaaatatattttgtttgttttttttctcagtttgatattggcatggctggtctcgatctaggcacaacttctcgctacgttcacaacgtcgaaggcggcggtgttggccagttctccaccgacaaccaccacggagatgacgctggaggaaaccaccatcataaccataaccatcatcaaggtttggatttgatagcttctaatgacaactctggactaggcgatggcggcggaggagggagcggtgagctcgttatgcggcgtccacgtggccgtccagctggatcgaagaacaaaccgaaacctccaatgatcgtcacgcgcgagagcgcaaacactcttagggctcacatttttgaagtcggaagtggctgcgacgtcttcgagtgtatctccacttacgcgcggcggagacagcgagggatttgcgttctttccggaacaggaaccgtcactaacgtcagcatccgtcagccgacggcggtcggagctgttgtgactttgcgaggcactttcgagattctttccctctctggatcttttctcccgccgcctgctcctccaggagcgacgaacttgacgatattcctcgccggagctcagggacaagtcgttggaggtaacgtcgttggagaattgatggcggcggggccggtgatggtcatggcggcttcttttacgaacgtggcgtatgaaaggttgcctttggacgagcacgaggagcagttacaagtccaaagcggcggaggaaatatgtacacggaagccaccaacggaggtggaggcggaagcttgccgttcttcaatttaccaataagtttgcctcatatgggagttgaaaactggccggggaactcgtccggcgcctgtagggctccgttttagctactgttttaacaaacttaattttttttttttttcagattttctttgtgacggaatttaataatatatggagttatgatttttttttaaaacaattgttcatgtattgacctctcagtacatgcttcaagtttttttttacttaattatcgatttatatttaaagcttctaataaaataatattcgactaaaaaaaaaaaaaaa

SEQ ID NO: 69 - protein, 280 aa, Brassica napus
MAGLDLGTTSRYVHNVEGGGVGQFSTDNHHGDDAGGNHHHNHNHHQGLDLIASNDNSGLGDGGGGGSGELVMRRPRGRPAGSKNKPKPPMIVTRESANTLRAHIFEVGSGCDVFECISTYARRRQRGICVLSGTGTVTNVSIRQPTAVGAVVTLRGTFEILSLSGSFLPPPAPPGATNLTIFLAGAQGQVVGGNVVGELMAAGPVMVMAASFTNVAYERLPLDEHEEQLQVQSGGGNMYTEATNGGGGGSLPFFNLPISLPHMGVENWPGNSSGACRAPF

SEQ ID NO: 70 - DNA, 1124 bp, Brasscia napus
  CDS (1)..(948)
atggcgaatccatggtggacaggacaagtgaatctctccggcctcgaaacgacgccgccgagttcctctcagttaaagacaccagatctccacatctccatgaatatggccatggactcaggtcataacaaccaccaccatcatcaccaagaagtcaacaccaacaacaacaacgaagacgatagagacaacttgagcggcgacgaccacgagccacgtgaaggagccgtggaagctcccacgcgccgaccacgtggacgtcctgctggttccaagaacaaaccaaagccaccaatctttgtcacgcgtgactctccaaacgctctcaagagccatgtcatggagatcgctagtgggactgacgtcatcgaaaccctagctactttcgctaggcggcgccaacgtggcatctgcatcttgagcggtaacggcacggtggctaacgtcacactccgtcaaccatcagtggctcccgttgcagctgcccctggtggtgcggctgtattggcgttacaagggaggtttgagattctttctctaaccggttctttcttacctggaccggctccacctggatccactggtttaactatttacttagctggtggtcaaggtcaggttgttggaggaagcgtggtggggccattgatggctgctggtccggtgatgctaatcgctgccacgttttctaatgcgacttatgagagattacctttggatgaggaagaagcggctgaaagaggtggcggtggaagcgacggaggagtggttccagggcagctcgggggcgtaggttccccgctgagtagtggtggcggtggaggccatgggaaccaaggacttcccgcgtataatatgcccggaaatcttgcttctaatggcggtggaggaggacagatgagcggccaagaagcttacggttgggctcaagctaggtcaggattttaacgttaagatggctttttatttacagcagttaacaataaagaattacgttgatgtctattatgataatgatgatgaaaactagttgctaccagtgagctatatagtgtgtgggtacattatattatgttctcttgactatattatatatgctaaatttcactaaaaaaaaaaaaaaa

SEQ ID NO: 71 - protein, 315 aa, Brasscia napus
MANPWWTGQVNLSGLETTPPSSSQLKTPDLHISMNMAMDSGHNNHHHHHQEVNTNNNNEDDRDNLSGDDHEPREGAVEAPTRRPRGRPAGSKNKPKPPIFVTRDSPNALKSHVMEIASGTDVIETLATFARRRQRGICILSGNGTVANVTLRQPSVAPVAAAPGGAAVLALQGRFEILSLTGSFLPGPAPPGSTGLTIYLAGGQGQVVGGSVVGPLMAAGPVMLIAATFSNATYERLPLDEEEAAERGGGGSDGGVVPGQLGGVGSPLSSGGGGGHGNQGLPAYNMPGNLASNGGGGGQMSGQEAYGWAQARSGF

SEQ ID NO: 72 - DNA, 1200 bp, Brassica napus
  CDS (33)..(998)
tttcgccaacttatcgatctgagacgggtttaatggcggcgagcagagaatcatcaatgccattcacgatggctctccaccaccaacaacagcacaatcaaccaccttctccgccgcaaacgcaacagcagcagcagcagcagtcgtcaccaccaccaccgcagcagtaccaacacaactcagccggaggtgggaatcctggtttgaacatgaacatgcccgtgacgatgacgggaagtgagcctgtgaagaagaggagagggagaccgaggaagtacggtccggaactgggtttggttcccggagctcctactttcacccaggctcagacgagtggcggcggttccggcgaaggagggtcgtctacgcagaagaggatgagagggcggcctcgtggctctagcaataggaaaaagcttcaagctttaggctcgacaggagtgggatttgtacctcatgtacttaccgtggggactggagaggatgtatcatcaaagataatggcgttttctcagaacggaccaagaactgtgtgcgtcttgtctgcaaatggagctatctccaatgtgactcttcgccagttcgccacatctggtggaaccgttacatatgaggggagatttgagattctgtctttgtcgggctcgttcctcctggtagagaacaatggtcacagaagcaggacaggaggtctaagcgtggctttatcggctcctgatggtcatgtcttaggtggctgtgtagctggtcttcttatagcagcatcacctgttcagattgttgttgggagtttcataccagaggggcaaaaagaactagcgtcaccgacattactaccgcgtgtggccccaagtcaagtactgatgaatccgagtagcccgcagtctcgtggcgcaatgagtgagtcatctattggaggacatggaagccctcttcagcagagcaacacaggaggaccttacaacaacaccaacaacccttccatgccgtggaagtagccaaagtgatatatatatatatatctgtcttgctaaatgatgatgatgatgattcagacccattagtttaggctattttagttgagtttaaataacttaacatgcttttgtgttccgtggtatgctttaagagaccttgatttgttcagaaaattggaatatcctgattaatgtagatcttttttatgaaaaaaaaaaaaaa

SEQ ID NO: 73 - protein, 321 aa, Brassica napus
MAASRESSMPFTMALHHQQQHNQPPSPPQTQQQQQQQSSPPPPQQYQHNSAGGGNPGLNMNMPVTMTGSEPVKKRRGRPRKYGPELGLVPGAPTFTQAQTSGGGSGEGGSSTQKRMRGRPRGSSNRKKLQALGSTGVGFVPHVLTVGTGEDVSSKIMAFSQNGPRTVCVLSANGAISNVTLRQFATSGGTVTYEGRFEILSLSGSFLLVENNGHRSRTGGLSVALSAPDGHVLGGCVAGLLIAASPVQIVVGSFIPEGQKELASPTLLPRVAPSQVLMNPSSPQSRGAMSESSIGGHGSPLQQSNTGGPYNNTNNPSMPWK

SEQ ID NO: 74 - DNA, 954 bp, Brassica napus
  CDS (1)..(783)
atggctggaggtacagctctaactccaacctctgtaggatccaagtcactactcccactgaggaaccatgaagcagtagcagagagaggcactaacaacaacaacaacatgaaagcattgcccaaaccggttcaaccagtttcatcaatcgaaggagagatggctaagaggccgcgaggtagaccagctggctccaagaacaaacccaaaccaccaatcattgtcactcacgacagtcccaattccctcagagctcacgccgttgagatcagctcgggtaatgacatctgcgagactttatcagattacgcaagaaggaaacagagaggtctctgcatactaagtgccaacggttgcgtcaacaatgtgacgttaaggcagccagcttcatcaggaggtattgtgacattacacggacgtttcgagatcctctcgttgcttggatcaatcctgcctccaccagcaccgcttgggatcactggtttgaccatttacttagccggccctcaaggccaggttgtgggtggaggagtggttggtgggctaatcgcatctggtcccgttgttctcatggctgcatctttcatgaacgctgtgtttgatcgtcttcctctggatgatgatgaagctgcttctatgcacaaccagcaatactaccagaatggaagatcccgtcccttagatgacattcatggattgcctcagaacctactcactaatggaaactcgggttctgatatctactcttggggggctgcgcagcgtgccatgtccaagccttaatccataacctatcttatctccatggttcatcatatcaacgtaccatatagttaatttaccttggaatcaaagatcaaaccataagtttggtgaaagaactgaaaagtaatcttcctctgtagtttgtacctgcaacagtaaaaaagaaaaaacttataaaaaaaaaaaaaa

SEQ ID NO: 75 - protein, 260 aa, Brassica napus
MAGGTALTPTSVGSKSLLPLRNHEAVAERGTNNNNNMKALPKPVQPVSSIEGEMAKRPRGRPAGSKNKPKPPIIVTHDSPNSLRAHAVEISSGNDICETLSDYARRKQRGLCILSANGCVNNVTLRQPASSGGIVTLHGRFEILSLLGSILPPPAPLGITGLTIYLAGPQGQVVGGGVVGGLIASGPVVLMAASFMNAVFDRLPLDDDEAASMHNQQYYQNGRSRPLDDIHGLPQNLLTNGNSGSDIYSWGAAQRAMSKP

SEQ ID NO: 76 - DNA, 1190 bp, Brassica napus
  CDS (260)..(1129)
ggcgtgaataatctgctcctctcttgccctaaagctgagttaaggtttaaacacacaatagcactcttttgatttatgtctctttgttctgtttttgtcggtttgtgtaaccgatcaactcaagctattggctccttactccctgaaatttgacttctctattggatttcaccaaagtttctctatatgaagcaatctttaccctcacaatttcattatatttgagccacaagaaaaagaaaaagtacatgcgtttgtgatggacggtggttatgatcaatccggtcactctagatacttccataatctctttaggcctgagcttcaccaccagcttcagccacagcctcagcctcaacctcagcttcagccccagcctcaacctcagcttgagtctgatgatgaatctgactccaacaacaagtatccggttcaacctgattccgaccaggttacctcgggctcaacttccgggaagcgtccacgtggacgtcctccagggtctaagaacaagccgaagccaccggtgattgtgacaagagatagccccaacgtgcttagatctcatgttcttgaagtctcatctggagccgacataattgagagcgtcaacaattacgctcgccgaagagggaaaggtgtctccattctcagtggtaacggcgcggtggctaacctcactctccgacagcgggtgacgactcatgggaacaatggtggaactgaagccggagctggagggattgtgactttacatggaaggtttgagattctttccatcactggtacggtgcttccgccgcccgcgccgccgggatgcggtggtttatctatctttgttgctggtgaacaaggtcggatgatcggaggaagagtggtggctccgcttgtggcttctggtcccgtgatactgatggctgcatcgttctccaacgcaacttttgaaaggcttccgcttgaagatgaaggaggtgaaggtgggggagacgtcggaggaggagttccaccgccagccacttcagaaacaccgccgtctggagtcgctcaaggagagctaagagttaatatgagtggttatgatcagttttccggctggggagacggagccgctgcaagaccatcattttagatttgaaatttatgtccgtaaattccctgtaaccaaaatttcaattgaaaaaaaaaaaaaa

SEQ ID NO: 77 - protein, 289 aa, Brassica napus
MDGGYDQSGHSRYFHNLFRPELHHQLQPQPQPQPQLQPQPQPQLESDDESDSNNKYPVQPDSDQVTSGSTSGKRPRGRPPGSKNKPKPPVIVTRDSPNVLRSHVLEVSSGADIIESVNNYARRRGKGVSILSGNGAVANLTLRQRVTTHGNNGGTEAGAGGIVTLHGRFEILSITGTVLPPPAPPGCGGLSIFVAGEQGRMIGGRVVAPLVASGPVILMAASFSNATFERLPLEDEGGEGGGDVGGGVPPPATSETPPSGVAQGELRVNMSGYDQFSGWGDGAAARPSF

SEQ ID NO: 78 - DNA, 1054 bp, Glycine max
  CDS (91)..(924)
tttttacaataacccaatcatagtctcactcgggattggttattcttattctaagagataatccaaatccaaacccaaaagaacaacacaatgaaaggagaatacgtagagcaacagcaacaacatcctaagagtgaaacaccacctagtatgttctcaaagcttcagcctcagcaccatcctttcccgcaccaccctttccaactctccgccgaggatgccaccaccatcaccccgagcaccgctcagaaggccaactcctccggcggcgacggcgcgaccatcgaggttgttcggcgtcccaggggacgtccgcccgggtccaaaaacaagcccaagccaccggttatcataacccgtgacccggaacccgctatgagtccctacattttagaagtgtctggcggaaacgacgtcgtcgaggccatcgcgcagttcagtcaccgcaagaacatgggaatctgcgtcctcacgggttctggaaccgtcgctaacgtcacgctccgtcaaccttccaccacgcccggcaccaccgttacttttcacggccgtttcgacatcctttctgtttccgccaccttccttccgcagcagtccggcgcttctccggcggttcccaacggattcgccatctcgctcgccggaccgcaggggcagatcgtcggaggacttgttgccggcgggctgatggctgccgggactgtttttgtgatcgctgcctcgttcaacaacccggcataccacaggcttccgccggaggaagagggcgcctccgccggagatggacattcgccgccagtctccggcggcggagacagcgggcatggacaggcggagtcgtgtggaatgtccatgtacagctgtcacttgccctctgatgtgatttgggctccaacggctagaccaccgccgccgccttactgatcgatcaatcacacgtcgagtttctgtttctttttcttctgaggttaactttgtggttattgtaatcaattctactatatgttgctctgtttaatttgatttagttggtgtagttaaaaaaaaaaaaaaa

SEQ ID NO: 79 - protein, 277 aa, Glycine max
MKGEYVEQQQQHPKSETPPSMFSKLQPQHHPFPHHPFQLSAEDATTITPSTAQKANSSGGDGATIEVVRRPRGRPPGSKNKPKPPVIITRDPEPAMSPYILEVSGGNDVVEAIAQFSHRKNMGICVLTGSGTVANVTLRQPSTTPGTTVTFHGRFDILSVSATFLPQQSGASPAVPNGFAISLAGPQGQIVGGLVAGGLMAAGTVFVIAASFNNPAYHRLPPEEEGASAGDGHSPPVSGGGDSGHGQAESCGMSMYSCHLPSDVIWAPTARPPPPPY

SEQ ID NO: 80 - DNA, 1858 bp, Glycine max
  CDS (461)..(1507)
caaaaccctaatttcatatttcactccggagaatttgtcaaccagaattgttgtttttctctttaattgtagatttttttttcaaaaaatttgttttattttttttgaagctctttccgctctctgcaatggtggagatttgagttactgtgtcgcgtctttctcggagttcaacctcaaccgttcaaaattatgcttctgggttttcgtcatttcagacaaaagtttctatttttgaggtgtttctgagcagttacaactttttctgtgcttaaacgtcattgtactgtttctgggtacgtcagttctgcattcaagtacatttgtcttcactgagttaaaaaagattcaatcttttctgctgtttatgattttgttaatgcttgaatcttcaatgggtagggtttaagtgtgttttaaggttttggggtgtcctagtttttctttgattcacaaaaaaatggaggaaagagagatttttagttctgggcatgctgttaatcttctcgaggccccccatagcttccacgtggcactaaactccgtgcagttttccgggcccacagtggagacaccggcaccagcaccagcaccggcaccggcaccagcaccggcaccggtaccggtgattgctccggtgatgaattcaggtagtacggaggggaagaagaagaggggcaggcctaggaagtatggaccggatggcaaggtggcgctgtcaccgatgccgatatcggcgtcgattccgttcaccggagacttctcagcctggaaaaggggcagagggaagccacttgaatcaatcaagaagacttttaagttttatgaagctggaggtgcaggatctggtgatggaattgcatactcggttggtgccaatttcacacctcacatccttacagtaaatgatggcgaggacgttactatgaagattatgtccttctctcaacaaggatatcgagcaatttgcattctgtctgcaaatggcacaatttcaaatgttacactacgccaaccaacttcttctggtggtactttaacatatgaggggcggtttgaaattctttccttgtctggttcatatataacaactgagaatggattaacaaagagcagatctggtggtatgagcatctctttggccggtccagatggtcgagtaatggggggtggattggctggtttgctggtagctgcaggtcctgtgcaggttgttgtggctagttttcttcctggtcatcagctggagcagcagaaaccgaagaagccaagggtggagcatataatatcaatggctgcccctatgcatgtcaaccctacttcagctgctgaagaaataagaattggtcttggtggagtaaagccaatcatgacaccagctgcttttcaagtggaccacatttttggcaatggccaaagctctgggaactcagcttctgatgattcagcctctttccctgaaaatgagtccaaccccagccatgcagatgctggagttgcatgctaaacatgctccctgccaagtatttggtgttctacagtgtcaaaccccttttgggctcatgcttgactgatgctgacaattaacatgacacttatagtgggatggatgagtgtcaggttggttttgacttgagaaattgttcgctttgtgttaggtgttattagtgttaggaaatctactttttaggctttccttgtttctctttggtgttatctaatattgtttactgagttgtagcagttagatgtaggatatatgtttgaaatgagtgcatgtgggtgctttctaaactgtaacctaacgatattatttgttgtgaaggaggaaattacatttcagcaaaaaaaaaaaaaa

SEQ ID NO: 81 - protein, 348 aa, Glycine max
MEEREIFSSGHAVNLLEAPHSFHVALNSVQFSGPTVETPAPAPAPAPAPAPAPVPVIAPVMNSGSTEGKKKRGRPRKYGPDGKVALSPMPISASIPFTGDFSAWKRGRGKPLESIKKTFKFYEAGGAGSGDGIAYSVGANFTPHILTVNDGEDVTMKIMSFSQQGYRAICILSANGTISNVTLRQPTSSGGTLTYEGRFEILSLSGSYITTENGLTKSRSGGMSISLAGPDGRVMGGGLAGLLVAAGPVQVVVASFLPGHQLEQQKPKKPRVEHIISMAAPMHVNPTSAAEEIRIGLGGVKPIMTPAAFQVDHIFGNGQSSGNSASDDSASFPENESNPSHADAGVAC

SEQ ID NO: 82 - DNA, 888 bp, Glycine max
  CDS (1)..(888)
atggcgaatagatggtgggctgggaatgtgggaatgataagagagcaagagttgatggaaaacagcaacaacaacaacaacaacaacaacgctactactactacaccgacgaatagcagcaacagcaacactaacgcgaacaccaacaccaacacgaccgaggaagaggtgagcagggataacggagaggaccagaaccaaaacctcggcagccacgaagggtcggagcccggaagcagcggtcggaggccacgtggcaggccagcggggtccaagaacaagcccaagccgcccatagtcataactaaggaaagccccaacgcgctccgaagccacgtcctggaaatcgcctccggcagcgatgtcgccgagagcatcgccgccttcgccaaccgccgccaccgtggcgtgtcggtgctcagcgggagtggcattgttgccaacgtcactctccgccagcctgccgccccggccggcgtcataacgctccatgggaggttcgagatactgtccctctcgggagcctttttgccgtccccctcgccgccgggagccacgggactaactgtctatttggctggcgggcaggggcaggttgtcggtggcactgtcgccggctcgctcgttgcctccgggcccgtgatggtgatcgccgccacttttgctaatgccacctatgagaggttgccactggaggatgaacaaggtgaggagggaatgcaagtgcaacagcagcagcagcagcagcagcagcaacaatcccaagggttgggtgaacaggtttcaatgcctatgtataatttgcctcctaatttgctacacaatggtcagaacatgcctcatgatgtgctttggggagctccacctcgccctcctccttccttctaa

SEQ ID NO: 83 - protein, 295 aa, Glycine max
MANRWWAGNVGMIREQELMENSNNNNNNNNATTTTPTNSSNSNTNANTNTNTTEEEVSRDNGEDQNQNLGSHEGSEPGSSGRRPRGRPAGSKNKPKPPIVITKESPNALRSHVLEIASGSDVAESIAAFANRRHRGVSVLSGSGIVANVTLRQPAAPAGVITLHGRFEILSLSGAFLPSPSPPGATGLTVYLAGGQGQVVGGTVAGSLVASGPVMVIAATFANATYERLPLEDEQGEEGMQVQQQQQQQQQQQSQGLGEQVSMPMYNLPPNLLHNGQNMPHDVLWGAPPRPPPSF

SEQ ID NO: 84 - DNA, 1189 bp, Glycine max
  CDS (153)..(965)
tcgcccacgcgtccgtacggctgcgagaagacgacagaaggggccactttatttgtctctctctttcccttccaacctcatcccattccgttttctctgcagtactcaattgatccctttgtttttctattcgttctgagagctttgtgtgtatggccggcatagacttgggttcagcatcacattttgttcatcatcgccttgaacgccctgaccttgaagacgatgagaaccaacaagaccaagacaacaaccttaacaatcacgaagggcttgacctagttacaccaaattcaggtcctggtgatgttgttggtcgcaggccaagaggaagacctccaggttcaaagaacaagccaaaaccaccagttatcatcacaagagagagtgcaaacacccttagggctcacatccttgaagttagtactggttgtgacgtctttgaatcggtcgctacctatgcaaggaagcggcaaagagggatatgtgtcctcagtgggagtggcaccgtgaccaacgtgacattgaggcagccggccgcggctggtgccgtcgtcacgctgcacggaaggtttgagatcctctctttgtcaggatcattcctcccacctccagctccaccaggtgctacaagtttgactgtgttccttggtggaggacagggtcaagtggtgggaggaaatgttgttggtcctttggtggcttctgggcctgttattgttattgcttcatcttttactaatgtagcatatgagaggttgcctttggatgaagatgaatctatgcagatgcaacaagggcaatcatcagctggtgatggtagcggtgaccatggtggtggagttagtaataactcttttccggatccgtcttccgggcttccattcttcaatttgccactaaacatgcctcagttacctgttgatggttgggctggcaactctggtggaaggcaatcttactgatccagagtctttgggggcacaaaggtgagaagttgaattgatctcatatatattggtcttctctaatctttcctctgaatattgcttgtgaagaagtactgatttttctattgaagaatcgttttgtttggctaggtttgttgtaaggacgatcagtttctaggaacaactgtaaaacgttttctcttggttgctggagttattagactagactgttgtgcatt

SEQ ID NO: 85 - protein, 270 aa, Glycine max
MAGIDLGSASHFVHHRLERPDLEDDENQQDQDNNLNNHEGLDLVTPNSGPGDVVGRRPRGRPPGSKNKPKPPVIITRESANTLRAHILEVSTGCDVFESVATYARKRQRGICVLSGSGTVTNVTLRQPAAAGAVVTLHGRFEILSLSGSFLPPPAPPGATSLTVFLGGGQGQVVGGNVVGPLVASGPVIVIASSFTNVAYERLPLDEDESMQMQQGQSSAGDGSGDHGGGVSNNSFPDPSSGLPFFNLPLNMPQLPVDGWAGNSGGRQSY

SEQ ID NO: 86 - DNA, 1203 bp, Arabidopsis thaliana (mouse-ear cress)
  CDS (187)..(960)
gcaaaataaatttgttaactattaatcacaatttttggtgacaacttaaccatctcctactcctcacaatcattcttttggtgtctctaccatttaataattcaccaaaatctccttacttaaactcacaaactcctcacaaattttctgaatctttcagttgaacatataacaacattcataacaatggctggaggtacagctctaactccaacctctgtaggatccaagtctgttccaatgaggaaccatgaagcaacagagagaggcaacaccaacaacaacctgagagcattacccaaagccgtccaaccggtttcatcaatcgaaggagagatggctaagaggccacgtggcagacccgctggctccaagaacaaacccaaaccaccaatcattgtgactcacgacagtccaaattccctcagagctaacgccgttgagatcagctcaggttgtgacatctgtgagactttatcggattttgcaagaaggaaacagagaggtctctgcattctcagtgccaatggttgtgtcaccaatgtgacattaaggcaaccagcttcatcaggagcaattgtcacattacacggacgttacgagatcctctcattgcttggatcaatcttgcctccaccagcaccacttggaataactggtctgaccatttacttagccggacctcaaggacaggttgttggtggaggagtggttggtgggctaatcgcatctggtcctgttgttctcatggctgcatctttcatgaatgctgtttttgatcgtcttcctatggatgatgatgaagctgcctctatgcagaaccagcagtactaccagaatggaagatcccgtcctttagatgacattcatggactgcctcaaaatctgctcactaatggaaactcggcttctgatatctactcttgggggcctgcgcagcgtgtcatgtcgaaaccttaatactactgctctaatctccacgtttcatcatatcaaatgccttaatcttattatctcatttaccttggaatcaaagataaatgtgtctgtaggttgagagagaaccgtaagtctggttaagaaactgaagcttatctccctttgtagtttgtacctgcaacagtaaaaagaaaaaactgaaaaaagcaaaagtaaatgattatgaattttaagcacaatcctctaatttaatacgaaaatatt

SEQ ID NO: 87 - protein, 257 aa, Arabidopsis thaliana (mouse-ear cress)
MAGGTALTPTSVGSKSVPMRNHEATERGNTNNNLRALPKAVQPVSSIEGEMAKRPRGRPAGSKNKPKPPIIVTHDSPNSLRANAVEISSGCDICETLSDFARRKQRGLCILSANGCVTNVTLRQPASSGAIVTLHGRYEILSLLGSILPPPAPLGITGLTIYLAGPQGQVVGGGVVGGLIASGPVVLMAASFMNAVFDRLPMDDDEAASMQNQQYYQNGRSRPLDDIHGLPQNLLTNGNSASDIYSWGPAQRVMSKP

SEQ ID NO: 88 - DNA, 1379 bp, Arabidopsis thaliana (mouse-ear cress)
  CDS (242)..(1120)
ctcaccttctccttctactttttatcatttccctttctcttcccattttagtcttcctataacttcttctcaatcctctctcatatcttttttcttagtttaaatttcaataaaatagaaaaaaacatatacaaatctacagagaagagaagctttattttaatcttgtgtgtgtgtgtgtgttttatataatttttattttttttcaaattaaaatctcttctttgcttttgatgtgggcatggctggtcttgatctaggcacagcttttcgttacgttaatcaccagctccatcgtcccgatctccaccttcaccacaattcctcctccgatgacgtcactcccggagccgggatgggtcatttcaccgtcgacgacgaagacaacaacaacaaccatcaaggtcttgacttagcctctggtggaggatcaggaagctctggaggaggaggaggtcacggcgggggaggagacgtcgttggtcgtcgtccacgtggcagaccaccgggatccaagaacaaaccgaaacctccggtaattatcacgcgcgagagcgcaaacactctaagagctcacattcttgaagtaacaaacggctgcgatgttttcgactgcgttgcgacttatgctcgtcggagacagcgagggatctgcgttctgagcggtagcggaacggtcacgaacgtcagcatacgtcagccatctgcggctggagcggttgtgacgctacaaggaacgttcgagattctttctctctccggatcgtttcttcctcctccggcacctcccggagcaacgagtttgacaattttcttagccggaggacaaggtcaggtggttggaggaagcgttgtgggtgagcttacggcggctggaccggtgattgtgattgcagcttcgtttactaatgttgcttatgagagacttcctttagaagaagatgagcagcagcaacagcttggaggaggatctaacggcggaggtaatttgtttccggaggtggcagctggaggaggaggaggacttccgttctttaatttaccgatgaatatgcaaccaaatgtgcaacttccggtggaaggttggccggggaattccggtggaagaggtcctttctgatgtgtatatattgataatcattatatatataccggcggagaagcttttccggcgaagaatttgcgagagtgaagaaaggttagaaaagcttttaatggactaatgaatttcaaattatcatcgtgatttcggacattgtcttgttcatcatgttaagcttaggtttattttttgtcgtttgtagaattttatgtttgaatccttttttttttctgtgaaactctattgtgttcgtctgcgaaggaaaaaaaaattctca

SEQ ID NO: 89 - protein, 292 aa, Arabidopsis thaliana (mouse-ear cress)
MAGLDLGTAFRYVNHQLHRPDLHLHHNSSSDDVTPGAGMGHFTVDDEDNNNNHQGLDLASGGGSGSSGGGGGHGGGGDVVGRRPRGRPPGSKNKPKPPVIITRESANTLRAHILEVTNGCDVFDCVATYARRRQRGICVLSGSGTVTNVSIRQPSAAGAVVTLQGTFEILSLSGSFLPPPAPPGATSLTIFLAGGQGQVVGGSVVGELTAAGPVIVIAASFTNVAYERLPLEEDEQQQQLGGGSNGGGNLFPEVAAGGGGGLPFFNLPMNMQPNVQLPVEGWPGNSGGRGPF

SEQ ID NO: 90 - DNA, 1375 bp, Arabidopsis thaliana (mouse-ear cress)
  CDS (288)..(1241)
ctctgacctaaccctaaacccatctctctctccttcttcttacaagcttcatctacatgtattactagtgcagctccagtttcgtcttacatgtatatgacttttgtattacccttctcttaatttctctacttcagatttttttctccttagattaatttaattgagttattgtacatccctcaagctaagattctggttttgtgagttgagtggatgagaagaggagagattaactaaattagggtttcaattgtttactttttgtttgctttttatatcaagtaatggatcaggtctctcgctctcttcctccaccttttctctcaagagatctccatcttcacccacaccatcaattccagcatcagcagcagcagcagcaacagaatcacggccacgatatagaccagcaccgaatcggtgggctaaaacgtgaccgagatgctgatatcgatcccaacgagcactcttcagccggaaaagatcaaagtactcctggctccggtggagaaagcggcggcggaggaggaggagataatcacatcacgagaaggccacgtggcagaccagcgggatctaagaacaaaccaaaaccgccaatcatcatcactcgagacagcgcaaacgctctcaaatctcatgtcatggaagtagcaaacggatgtgacgtcatggaaagtgtcaccgtcttcgctcgccgtcgccaacgtggcatctgcgttttgagcggaaacggcgccgttaccaacgttaccataagacaaccagcttcagtacctggtggtggctcatctgtcgttaacttacacggacgtttcgagattctttctctctcgggatcattccttcctcctccggctccaccagctgcgtcaggtctaacgatttacttagccggtggtcagggacaggttgttggaggaagcgtggttggtccactcatggcttcaggacctgtagtgattatggcagcttcgtttggaaacgctgcgtatgagagactgccgttggaggaagacgatcaagaagagcaaacagctggagcggttgctaataatatcgatggaaacgcaacaatgggtggtggaacgcaaacgcaaactcagacgcagcagcaacagcaacaacagttgatgcaagatccgacgtcgtttatacaagggttgcctccgaatcttatgaattctgttcaattgccagctgaagcttattggggaactccgagaccatctttctaaatcgcgaagaaaaaacaagttagatacgttcgttgtttttaatttataatctctcttctgtcaagttttaattttctttttcttcttctttgttttctaaagataattgtagtctttgacgaagattcgtggta

SEQ ID NO: 91 - protein, 317 aa, Arabidopsis thaliana (mouse-ear cress)
MDQVSRSLPPPFLSRDLHLHPHHQFQHQQQQQQQNHGHDIDQHRIGGLKRDRDADIDPNEHSSAGKDQSTPGSGGESGGGGGGDNHITRRPRGRPAGSKNKPKPPIIITRDSANALKSHVMEVANGCDVMESVTVFARRRQRGICVLSGNGAVTNVTIRQPASVPGGGSSVVNLHGRFEILSLSGSFLPPPAPPAASGLTIYLAGGQGQVVGGSVVGPLMASGPVVIMAASFGNAAYERLPLEEDDQEEQTAGAVANNIDGNATMGGGTQTQTQTQQQQQQQLMQDPTSFIQGLPPNLMNSVQLPAEAYWGTPRPSF

SEQ ID NO: 92 - DNA, 858 bp, Arabidopsis thaliana (mouse-ear cress)
  CDS (1)..(858)
atggctggtctcgatctaggcacaacttctcgctacgtccacaacgtcgatggtggcggcggcggacagttcaccaccgacaaccaccacgaagatgacggtggcgctggaggaaaccaccatcatcaccatcataatcataatcaccatcaaggtttagatttaatagcttctaatgataactctggactaggcggcggtggaggaggagggagcggtgacctcgtcatgcgtcggccacgtggccgtccagctggatcgaagaacaaaccgaagccgccggtgattgtcacgcgcgagagcgcaaacactcttagggctcacattcttgaagttggaagtggctgcgacgttttcgaatgtatctccacttacgctcgtcggagacagcgcgggatttgcgttttatccgggacgggaaccgtcactaacgtcagcatccgtcagcctacggcggccggagctgttgtgactctgcggggtacttttgagattctttccctctccggatcttttcttccgccacctgctcctccaggggcgactagcttgacgatattcctcgctggagctcaaggacaggtcgtcggaggtaacgtagttggtgagttaatggcggcggggccggtaatggtcatggcagcgtcttttacaaacgtggcttacgaaaggttgcctttggacgagcatgaggagcacttgcaaagtggcggcggcggaggtggagggaatatgtactcggaagccactggcggtggcggagggttgcctttctttaatttgccgatgagtatgcctcagattggagttgaaagttggcaggggaatcacgccggcgccggtagggctccgttttag

SEQ ID NO: 93 - protein, 285 aa, Arabidopsis thaliana (mouse-ear cress)
MAGLDLGTTSRYVHNVDGGGGGQFTTDNHHEDDGGAGGNHHHHHHNHNHHQGLDLIASNDNSGLGGGGGGGSGDLVMRRPRGRPAGSKNKPKPPVIVTRESANTLRAHILEVGSGCDVFECISTYARRRQRGICVLSGTGTVTNVSIRQPTAAGAVVTLRGTFEILSLSGSFLPPPAPPGATSLTIFLAGAQGQVVGGNVVGELMAAGPVMVMAASFTNVAYERLPLDEHEEHLQSGGGGGGGNMYSEATGGGGGLPFFNLPMSMPQIGVESWQGNHAGAGRAPF

SEQ ID NO: 94 - DNA, 1517 bp, Arabidopsis thaliana (mouse-ear cress)
  CDS (469)..(1404)
ggaccaaaaatttattgcagagtcgcacatgaatctcaagcttctctctcctttttttcccatagcacatcagaatcgctaaatacgactcctatgcaaagaagaagctacttctttctcttgccctaattaatctacctaactagggtttcctcttacctttcatgagagagatcatttaacataagtcaccttttttatatcttttgcttcgtctttaatttagttctgttcttggtctgtttctatattttgtcggcttgcgtaaccgatcacaccttaatgctttagctattgtttcctcaaaatcatgagttttgacttctcgatctgagttttctttttctctctttacgctcttcttcacctagctaccaatatatgaacgagcaggatcaagaatcgagaaattgatttgagctggcgaataagcagtggtgggatagggaattagtagatgcggcggcgatggaaggcggttacgagcaaggcggtggagcttctagatacttccataacctctttagaccggagattcaccaccaacagcttcaaccgcagggcgggatcaatcttatcgaccagcatcatcatcagcaccagcaacatcaacaacaacaacaaccgtcggatgattcaagagaatctgaccattcaaacaaagatcatcatcaacagggtcgacccgattcagacccgaatacatcaagctcagcaccgggaaaacgtccacgtggacgtccaccaggatctaagaacaaagccaagccaccgatcatagtaactcgtgatagccccaacgcgcttagatctcacgttcttgaagtatctcctggagctgacatagttgagagtgtttccacgtacgctaggaggagagggagaggcgtctccgttttaggaggaaacggcaccgtatctaacgtcactctccgtcagccagtcactcctggaaatggcggtggtgtgtccggaggaggaggagttgtgactttacatggaaggtttgagattctttcgctaacggggactgttttgccacctcctgcaccgcctggtgccggtggtttgtctatatttttagccggagggcaaggtcaggtggtcggaggaagcgttgtggctccccttattgcatcagctccggttatactaatggcggcttcgttctcaaatgcggttttcgagagactaccgattgaggaggaggaagaagaaggtggtggtggcggaggaggaggaggaggagggccaccgcagatgcaacaagctccatcagcatctccgccgtctggagtgaccggtcagggacagttaggaggtaatgtgggtggttatgggttttctggtgatcctcatttgcttggatggggagctggaacaccttcaagaccacctttttaattgaattttaatgtccggaaatttatgtgtttttatcatcttgtggagtcgtctttcctttgggatatttggtgtttaatgtttagttgatatgcatattttggtttctcgtg

SEQ ID NO: 95 - protein, 311 aa, Arabidopsis thaliana (mouse-ear cress)
MEGGYEQGGGASRYFHNLFRPEIHHQQLQPQGGINLIDQHHHQHQQHQQQQQPSDDSRESDHSNKDHHQQGRPDSDPNTSSSAPGKRPRGRPPGSKNKAKPPIIVTRDSPNALRSHVLEVSPGADIVESVSTYARRRGRGVSVLGGNGTVSNVTLRQPVTPGNGGGVSGGGGVVTLHGRFEILSLTGTVLPPPAPPGAGGLSIFLAGGQGQVVGGSVVAPLIASAPVILMAASFSNAVFERLPIEEEEEEGGGGGGGGGGGPPQMQQAPSASPPSGVTGQGQLGGNVGGYGFSGDPHLLGWGAGTPSRPPF

SEQ ID NO: 96 - DNA, 909 bp, Arabidopsis thaliana (mouse-ear cress)
  CDS (1)..(909)
atggacggtggttacgatcaatccggaggagcttctagatactttcacaacctcttcaggcctgagcttcatcaccagcttcaacctcagcctcaacttcaccctttgcctcagcctcagcctcaacctcagcctcagcagcagaattcagatgatgaatctgactccaacaaggacccgggttccgacccagttacctctggttcaaccgggaaacgtccacgtggacgtcctccgggatccaagaacaagccgaagccaccggtgatagtgactagagatagccccaacgtgcttagatctcatgttcttgaagtctcatctggagccgacatagtcgagagcgttaccacttacgctcgcaggagaggaagaggagtctccattctcagtggtaacggcacggtggctaacgtcagtctccggcagccggcaacgacagcggctcatggggcaaatggtggaaccggaggtgttgtggctctacatggaaggtttgagatactttccctcacaggtacggtgttgccgccccctgcgccgccaggatccggtggtctttctatctttctttccggcgttcaaggtcaggtgattggaggaaacgtggtggctccgcttgtggcttcgggtccagtgatactaatggctgcatcgttctctaatgcaactttcgaaaggcttccccttgaagatgaaggaggagaaggtggagagggaggagaagttggagagggaggaggaggagaaggtggtccaccgccggccacgtcatcatcaccaccatctggagccggtcaaggacagttaagaggtaacatgagtggttatgatcagtttgccggtgatcctcatttgcttggttggggagccgcagccgcagccgcaccaccaagaccagccttttag

SEQ ID NO: 97 - protein, 302 aa, Arabidopsis thaliana (mouse-ear cress)
MDGGYDQSGGASRYFHNLFRPELHHQLQPQPQLHPLPQPQPQPQPQQQNSDDESDSNKDPGSDPVTSGSTGKRPRGRPPGSKNKPKPPVIVTRDSPNVLRSHVLEVSSGADIVESVTTYARRRGRGVSILSGNGTVANVSLRQPATTAAHGANGGTGGVVALHGRFEILSLTGTVLPPPAPPGSGGLSIFLSGVQGQVIGGNVVAPLVASGPVILMAASFSNATFERLPLEDEGGEGGEGGEVGEGGGGEGGPPPATSSSPPSGAGQGQLRGNMSGYDQFAGDPHLLGWGAAAAAAPPRPAF

SEQ ID NO: 98 - DNA, 1563 bp, Arabidopsis thaliana (mouse-ear cress)
  CDS (293)..(1267)
actttccaaatttcacttcctccaactcaaagaaagagatcagaagctatagctatacaccaaaactaggtatagagagagaaaccctacaaaatcaaaaggaagaagagacgaagatgaagaagatccagcttggatttcgttgttcatcattactactctctttcttcttctagctagctagttttgacagcaaaataagaagcaaaaaaaaggtcaactaaaaaagatctgttcttagatcactctcttcttctttttttgatccaattccaccattgaatcatagatcatggatccagtacaatctcatggatcacaaagctctctacctcctcctttccacgcaagagactttcaattacatcttcaacaacagcaacaagagttcttcctccaccatcaccagcaacaaagaaaccaaaccgatggtgaccaacaaggaggatcaggaggaaaccgacaaatcaagatggatcgtgaagagacaagcgacaacatagacaacatagctaacaacagcggtagtgaaggtaaagacatagatatacacggtggttcaggagaaggaggtggtggctccggaggagatcatcagatgacaagaagaccaagaggaagaccagcgggatccaagaacaaaccaaaaccaccgattatcatcacacgggacagcgcaaacgcgcttagaacccacgtgatggagatcggagatggctgcgacttagtcgaaagcgttgccacttttgcacgaagacgccaacgcggcgtttgcgttatgagcggtactggaaatgttactaacgtcactatacgtcagcctggatctcatccttctcctggctcggtagttagtcttcacggaaggttcgagattctatctctctcaggatcttttctccctcctccggctcctcctacagccaccggattgagtgtttacctcgctggaggacaaggacaggtggttggaggaagcgtagttggtccgttgttatgtgctggtcctgtcgttgtcatggctgcgtcttttagcaatgcggcgtacgaaaggttgcctttagaggaagatgagatgcagacgccggttcatggcggaggaggaggaggatcattggagtcgccgccaatgatgggacaacaactgcaacatcagcaacaagctatgtcaggtcatcaagggttaccacctaatcttcttggttcggttcagttgcagcagcaacatgatcagtcttattggtcaacgggacgaccaccgtattgatcaaatatacacacacactcataatcgttgctagctagctaacgatgaatcatgagtttagtggatatatatatgattaaaagaggttagcttatgaacattaataagagtttggattctatcgagcttcattatgtttgggtcaacgttcataagatgaaccaggttcttttttctcaaatttttattttggttcgtttttagctcgtagatctttttatgttgattttagtaacatttttctgtttgtcttggtttttctttgatgaattctcattgctagtttgcatttgatt

SEQ ID NO: 99 - protein, 324 aa, Arabidopsis thaliana (mouse-ear cress)
MDPVQSHGSQSSLPPPFHARDFQLHLQQQQQEFFLHHHQQQRNQTDGDQQGGSGGNRQIKMDREETSDNIDNIANNSGSEGKDIDIHGGSGEGGGGSGGDHQMTRRPRGRPAGSKNKPKPPIIITRDSANALRTHVMEIGDGCDLVESVATFARRRQRGVCVMSGTGNVTNVTIRQPGSHPSPGSVVSLHGRFEILSLSGSFLPPPAPPTATGLSVYLAGGQGQVVGGSVVGPLLCAGPVVVMAASFSNAAYERLPLEEDEMQTPVHGGGGGGSLESPPMMGQQLQHQQQAMSGHQGLPPNLLGSVQLQQQHDQSYWSTGRPPY

SEQ ID NO: 100 - DNA, 1177 bp, Arabidopsis thaliana (mouse-ear cress)
  CDS (365)..(1177)
cattccatttcacatgaagatctagatctgggtccagacaaatttcaccgacccagctctttcacatatgtagacctctctctctctaattattcagtaaggttttgttctctcttgtcgtcttcttgttttgtccgtagcattattaataatcaaactcagtctctgaaatactctcagtgacaaaccacttctgtcgacttttgtctttgtctctcactagctataaccaaaaaaatccaaaaacccaaaccacagtttcttgtttttgttatcaatgtctagttatatgcaccctcttctagggcaagaactgcatctacagagacctgaagattccagaaccccacctgatcaaaataacatggaacttaacagatctgaagcagacgaagcaaaggccgagaccactcccaccggtggagccaccagctcagccacagcctctggctcttcctccggacgtcgtccacgtggtcgtcctgcaggttccaaaaacaaacccaaacctccgacgattataactagagatagtcctaacgtccttagatcacacgttcttgaagtcacctccggttcggacatatccgaggcagtctccacctacgccactcgtcgcggctgcggcgtttgcattataagcggcacgggtgcggtcactaacgtcacgatacggcaacctgcggctccggctggtggaggtgtgattaccctgcatggtcggtttgacattttgtctttgaccggtactgcgcttccaccgcctgcaccaccgggagcaggaggtttgacggtgtatctagccggaggtcaaggacaagttgtaggagggaatgtggctggttcgttaattgcttcgggaccggtagtgttgatggctgcttcttttgcaaacgcagtttatgataggttaccgattgaagaggaagaaaccccaccgccgagaaccaccggggtgcagcagcagcagccggaggcgtctcagtcgtcggaggttacggggagtggggcccaggcgtgtgagtcaaacctccaaggtggaaatggtggaggaggtgttgctttctacaatcttggaatgaatatgaacaattttcaattctccgggggagatatttacggtatgagcggcggtagcggaggaggtggtggcggtgcgactagacccgcgttttag

SEQ ID NO: 101 - protein, 270 aa, Arabidopsis thaliana (mouse-ear cress)
MELNRSEADEAKAETTPTGGATSSATASGSSSGRRPRGRPAGSKNKPKPPTIITRDSPNVLRSHVLEVTSGSDISEAVSTYATRRGCGVCIISGTGAVTNVTIRQPAAPAGGGVITLHGRFDILSLTGTALPPPAPPGAGGLTVYLAGGQGQVVGGNVAGSLIASGPVVLMAASFANAVYDRLPIEEEETPPPRTTGVQQQQPEASQSSEVTGSGAQACESNLQGGNGGGGVAFYNLGMNMNNFQFSGGDIYGMSGGSGGGGGGATRPAF

SEQ ID NO: 102 - DNA, 1504 bp, Arabidopsis thaliana (mouse-ear cress)
  CDS (171)..(1190)
agacaagagtagagagagaaaataaaaccttaccaaatcaatcaaagaataagatgaagaacaaaattccagcttgatgtattttgtgaaaacattattattcttttcctcttctatctagagtctctcctaggtcaaattatcaaaatcaattctcatctcaacatagaatggatccagttcaatctcatggatcacaaagctctcttcctcctcctttccatgctagagatttccaattacatcttcaacaacaacaacaacatcaacaacaacatcaacaacaacaacaacaacagttctttctccaccatcatcagcaaccacaaagaaaccttgatcaagatcacgagcagcaaggagggtcaatattgaatagatctatcaagatggatcgcgaagagacaagcgataacatggacaacatcgctaataccaacagcggtagcgaaggtaaagagatgagtttacacggaggagaaggaggaagcggtggtggaggaagtggagaacagatgacaagaaggccaagaggaagaccagcaggatccaagaacaaacctaaagctccaataatcataacaagagacagcgcaaacgcgcttcgaactcacgtcatggagataggagacggatgtgacatagttgactgtatggctacgttcgctagacgccgccaaagaggcgtttgcgttatgagcggtacaggaagcgttactaacgtcactatacgtcagcctggatcgccacctggctcggtggttagccttcacggccggtttgaaatcctctctctttcgggatctttcttgcctccgcctgcgccgcctgcagccaccggactaagcgtttacctagccggaggacaagggcaggtcgttggaggtagtgtggtgggacctttgttgtgttcgggtcctgtggtggttatggcggcttcttttagcaatgcggcgtacgaaaggctgcctttggaagaagatgagatgcagacgccagttcaaggaggcggtggaggaggaggaggtggtggtggaatgggatctcccccgatgatgggacagcaacaagctatggcagctatggcggcggctcaaggactaccaccgaatcttcttggttcggttcagttgccaccgccacaacagaatgatcagcagtattggtctacgggtcggccaccgtattgattattagattgctattattatatatacatgatcaatggaatatatacatatatagctatgtatttgtatatatgtagctatttactaatagatcttacatatatataaagcaagctaacatggaatcattaaaaggaggtctacgaagtatgacgtgaagttgaagacggcgataatattgaagatcaacaattcagtagatggttttcaggttcttctttgttttttttgtttcctttgggttcgttttagtggtagatcttttttttttaatgtttgattatgtgaggttaatttaagttgttatttacttt

SEQ ID NO: 103 - protein, 339 aa, Arabidopsis thaliana (mouse-ear cress)
MDPVQSHGSQSSLPPPFHARDFQLHLQQQQQHQQQHQQQQQQQFFLHHHQQPQRNLDQDHEQQGGSILNRSIKMDREETSDNMDNIANTNSGSEGKEMSLHGGEGGSGGGGSGEQMTRRPRGRPAGSKNKPKAPIIITRDSANALRTHVMEIGDGCDIVDCMATFARRRQRGVCVMSGTGSVTNVTIRQPGSPPGSVVSLHGRFEILSLSGSFLPPPAPPAATGLSVYLAGGQGQVVGGSVVGPLLCSGPVVVMAASFSNAAYERLPLEEDEMQTPVQGGGGGGGGGGGMGSPPMMGQQQAMAAMAAAQGLPPNLLGSVQLPPPQQNDQQYWSTGRPPY

SEQ ID NO: 104 - DNA, 1588 bp, Arabidopsis thaliana (mouse-ear cress)
  CDS (368)..(1300)
ctcctcccctgccaaaaaaaaaaaaccctgttgggtctatctttctctctctgtcttctacttcttttgattttaaccttttttcagtagcaagccaaaaaaaaaaaacagacaaagaagttccttttatgataaaggtatgatgatagcaaacaaatgatacccccatgtcttgtgtgtctgcttcatgcaacatgttggtttggatttggttaatctaaaagtttaagataaggttttcggattctcttcctgtcttgtaatagtttcttgtcggagagccatcaacaccaacttcaacaaaaaaaacaagaaaaagaaaaagattctctttctcgttttatttccattagagaagaaaaaaagaatggcgaatccttggtgggtagggaatgttgcgatcggtggagttgagagtccagtgacgtcatcagctccttctttgcaccacagaaacagtaacaacaacaacccaccgactatgactcgttcggatccaagattggaccatgacttcaccaccaacaacagtggaagccctaatacccagactcagagccaagaagaacagaacagcagagacgagcaaccagctgttgaacccggatccggatccgggtctacgggtcgtcgtcctagaggtagacctcctggttccaagaacaaaccaaagagtccagttgttgttaccaaagaaagccctaactctctccagagccatgttcttgagattgctacgggagctgacgtggcggaaagcttaaacgcctttgctcgtagacgcggccggggcgtttcggtgctgagcggtagtggtttggttactaatgttactctgcgtcagcctgctgcatccggtggagttgttagtttacgtggtcagtttgagatcttgtctatgtgtggggcttttcttcctacgtctggctctcctgctgcagccgctggtttaaccatttacttagctggagctcaaggtcaagttgtgggaggtggagttgctggcccgcttattgcctctggacccgttattgtgatagctgctacgttttgcaatgccacttatgagaggttaccgattgaggaagaacaacagcaagagcagccgcttcaactagaagatgggaagaagcagaaagaagagaatgatgataacgagagtgggaataacggaaacgaaggatcgatgcagccgccgatgtataatatgcctcctaattttatcccaaatggtcatcaaatggctcaacacgacgtgtattggggtggtcctccgcctcgtgctcctccttcgtattgattagttagataggcggtggttggtgcgttctttttactggaatgattatattttccattaggatggttaggcttttgtttattaaagctatcaagtttcttttttttttacggataattcggatgacaattagctagtgtttgtttgtttgttttgtggcggcttttctgacttgactattttgatcgcggatagctttgtatgaaagtgaattgattgtagaatcgtcttttgaattttgatgttggaaaaaaccaagcaatggtgtgtggcctttgcaatggaagc

SEQ ID NO: 105 - protein, 310 aa, Arabidopsis thaliana (mouse-ear cress)
MANPWWVGNVAIGGVESPVTSSAPSLHHRNSNNNNPPTMTRSDPRLDHDFTTNNSGSPNTQTQSQEEQNSRDEQPAVEPGSGSGSTGRRPRGRPPGSKNKPKSPVVVTKESPNSLQSHVLEIATGADVAESLNAFARRRGRGVSVLSGSGLVTNVTLRQPAASGGVVSLRGQFEILSMCGAFLPTSGSPAAAAGLTIYLAGAQGQVVGGGVAGPLIASGPVIVIAATFCNATYERLPIEEEQQQEQPLQLEDGKKQKEENDDNESGNNGNEGSMQPPMYNMPPNFIPNGHQMAQHDVYWGGPPPRAPPSY

SEQ ID NO: 106 - DNA, 798 bp, Arabidopsis thaliana (mouse-ear cress)
  CDS (1)..(798)
atggatgaggtatctcgttctcatacaccgcaatttctatcaagtgatcatcagcactatcaccatcaaaacgctggacgacaaaaacgcggcagagaagaagaaggagttgaacccaacaatataggggaagacctagccacctttccttccggagaagagaatatcaagaagagaaggccacgtggcagacctgctggttccaagaacaaacccaaagcaccaatcatagtcactcgcgactccgcgaacgccttcagatgtcacgtcatggagataaccaacgcctgcgatgtaatggaaagcctagccgtcttcgctagacgccgtcagcgtggcgtttgcgtcttgaccggaaacggggccgttacaaacgtcaccgttagacaacctggcggaggcgtcgtcagtttacacggacggtttgagattctttctctctcgggttcgtttcttcctccaccggcaccaccagctgcgtctggtttaaaggtttacttagccggtggtcaaggtcaagtgatcggaggcagtgtggtgggaccgcttacggcatcaagtccggtggtcgttatggcagcttcatttggaaacgcatcttacgagaggctgccactagaggaggaggaggaaactgaaagagaaatagatggaaacgcggctagggcgattggaacgcaaacgcagaaacagttaatgcaagatgcgacatcgtttattgggtcgccgtcgaatttaattaactctgtttcgttgccaggtgaagcttattggggaacgcaacgaccgtctttctaa

SEQ ID NO: 107 - protein, 265 aa, Arabidopsis thaliana (mouse-ear cress)
MDEVSRSHTPQFLSSDHQHYHHQNAGRQKRGREEEGVEPNNIGEDLATFPSGEENIKKRRPRGRPAGSKNKPKAPIIVTRDSANAFRCHVMEITNACDVMESLAVFARRRQRGVCVLTGNGAVTNVTVRQPGGGVVSLHGRFEILSLSGSFLPPPAPPAASGLKVYLAGGQGQVIGGSVVGPLTASSPVVVMAASFGNASYERLPLEEEEETEREIDGNAARAIGTQTQKQLMQDATSFIGSPSNLINSVSLPGEAYWGTQRPSF

SEQ ID NO: 108 - DNA, 801 bp, Oryza sativa
  CDS (1)..(801)
atgggcttgccggagcagccgtccggctcgtcgggccccaaggcggagctcccggtggccaaggagccggaggcgagcccgacggggggcgcggcggcggaccacgccgacgagaacaacgaatccggcggcggcgagccgcgggagggcgccgtggtggcggcgcccaaccggcgcccccgcggccgcccgccgggctccaagaacaagccgaagccgcccatcttcgtgacgcgcgacagccccaacgcgctgcgcagccacgtcatggaggtggccggcggcgccgacgtcgccgacgccatcgcgcagttctcgcgccgccgccagcgcggcgtctgcgtgctcagcggcgccgggacggtcgccaacgtcgcgctgcgccagccgtcggcgcccggcgccgtcgtcgccctgcacggccgcttcgagatcctctccctcaccggcaccttcctccccggcccggcgcctccgggctccacggggctcaccgtctacctcgccggcggccagggccaggttgtcggcggcagcgtcgtggggtcgctcatcgccgcgggcccggtcatggtgatcgcgtccacgttcgccaacgccacctacgagcgcctgccattggaggaagaagaggagggctcaggcccgcccatgcccggcggcgccgagcccctcatggccggcggccacggcatcgccgacccttcggcgctgccaatgttcaacctgccgccgagcaacgggctcggcggcggcggcgacggtttcccatgggcggcgcacccccgcccaccgtactga

SEQ ID NO: 109 - protein, 266 aa, Oryza sativa
MGLPEQPSGSSGPKAELPVAKEPEASPTGGAAADHADENNESGGGEPREGAVVAAPNRRPRGRPPGSKNKPKPPIFVTRDSPNALRSHVMEVAGGADVADAIAQFSRRRQRGVCVLSGAGTVANVALRQPSAPGAVVALHGRFEILSLTGTFLPGPAPPGSTGLTVYLAGGQGQVVGGSVVGSLIAAGPVMVIASTFANATYERLPLEEEEEGSGPPMPGGAEPLMAGGHGIADPSALPMFNLPPSNGLGGGGDGFPWAAHPRPPY

SEQ ID NO: 110 - DNA, 1065 bp, Oryza sativa
  CDS (1)..(1065)
atggaggtgaggtcggagcaagggctaatggcggggagggatctgttcggcatgccgaagagcccgccggcggcggccgcggcgccgccgcagagcgtgcgcatggcgtacacctcggacggcaccccggtgttcgccccggtgagcgccgcggtctcggcgccgccgggttaccagccgggtggcgccgccggtggcaatggcgcggcggcgctggcggactccggcggggagcccgtggccaagaagaagcgcgggcggccgaggaagtacggccccgacgggtccatgtcgctggggttggtgacctcgccgacggccgccgcgtcgacgccggtggcgcagggcgtcccagggccgttctcgccgacgcagccgaagccgccggcgagcttcttgtcgtcggggtggccggacggggtgaagaagcgtggccggcccaagggttctaccaacaagccgcgcatcgacgccgtcggatcggcgggagttggatttacaccacacgttattacagttctagctggagaggatgtgtctgcaaagattatgtcgtttgctcagcatggaaatcgtgcggtttgtgttctttcagcaaatggtgccatatcaaatgtaacacttcgccaaactgctacttcaggtggaacagtaacatatgagggccgattcgagatactatcgctgtctggctctttccttctaaccgaccatggaggccagcgtagtcgaactgggggactcagtgtttcactggctggtcctgatggtcgtctgttgggaggcggtgttgccggacttctcatagcagctactccagtccagattgtggttggaagcttcaattctgaagggaaaaaggagccaaagcagcatgctcattcagaacccgcatccgcgccatcgaaagccgtgccgacggccgggatgggacccaacagcccaccttcaagaggcacattgagtgaatcctcaggtggagctggaagcccattgcatccaggcattgctcctcccagcagcaacagccagccgccattcttgtctagcatgccatggaaatga

SEQ ID NO: 111 - protein, 354 aa, Oryza sativa
MEVRSEQGLMAGRDLFGMPKSPPAAAAAPPQSVRMAYTSDGTPVFAPVSAAVSAPPGYQPGGAAGGNGAAALADSGGEPVAKKKRGRPRKYGPDGSMSLGLVTSPTAAASTPVAQGVPGPFSPTQPKPPASFLSSGWPDGVKKRGRPKGSTNKPRIDAVGSAGVGFTPHVITVLAGEDVSAKIMSFAQHGNRAVCVLSANGAISNVTLRQTATSGGTVTYEGRFEILSLSGSFLLTDHGGQRSRTGGLSVSLAGPDGRLLGGGVAGLLIAATPVQIVVGSFNSEGKKEPKQHAHSEPASAPSKAVPTAGMGPNSPPSRGTLSESSGGAGSPLHPGIAPPSSNSQPPFLSSMPWK

SEQ ID NO: 112 - DNA, 708 bp, Oryza sativa
  CDS (1)..(708)
atggcgtccaaggagccaagcggcgaccacgaccacgagatgaacgggaccagcgccgggggcggcgagcccaaggacggcgcggtggtgaccggccgcaaccggcgcccccgcggacggccgccgggctccaagaacaagcccaagccgcccatcttcgtgacgcgggacagcccgaacgcgctgcgcagccacgtcatggaggtggccggcggcgccgatgtcgccgagtccatcgcgcacttcgcgcggcggcggcagcgcggcgtctgcgtgctcagcggggccggcaccgtgaccgacgtggccctgcgccagccggccgcgccgagcgccgtggtggcgctccgtgggcggttcgagatcctgtccctgacggggacgttcctgccggggccggcgccgccgggctccaccgggctgaccgtgtacctcgccggcgggcaggggcaggtggtgggcggcagcgtggtggggacgctcaccgcggcggggccggtcatggtgatcgcctccaccttcgccaacgccacctacgagaggctgccgctggatcaggaggaggaggaagcagcggcaggcggcatgatggcgccgccgccactcatggccggcgccgccgatccactacttttcggcgggggaatgcacgacgccgggcttgctgcatggcaccatgcccgccctccgccgccgccgccctactag

SEQ ID NO: 113 - protein, 235 aa, Oryza sativa
MASKEPSGDHDHEMNGTSAGGGEPKDGAVVTGRNRRPRGRPPGSKNKPKPPIFVTRDSPNALRSHVMEVAGGADVAESIAHFARRRQRGVCVLSGAGTVTDVALRQPAAPSAVVALRGRFEILSLTGTFLPGPAPPGSTGLTVYLAGGQGQVVGGSVVGTLTAAGPVMVIASTFANATYERLPLDQEEEEAAAGGMMAPPPLMAGAADPLLFGGGMHDAGLAAWHHARPPPPPPY

SEQ ID NO: 114 - DNA, 1847 bp, Oryza sativa
  CDS (317)..(1435)
ggctcttgctgctcctcttctcctcgcttcgtcttcttcctcctctcgcctcttcgttgcgagtagagagatttttgttgtgatttttgagggaatatttttggatttttggtttatttttgtgtgggtttttttggaggtgtatttattttgtttttttggtggtgatttatttttgagaggttttaagggattaagggaggtgtgtgaggaagatggggttagtgtgtgtgagctccaatggcgagagctcgtggcggaaaccctactaggttgaggaggaggaggaggtcgtcgtcgcgctcgcgtgtggaccatggaggccaagtcgggggaagcgagcgttgcgccggtggccgtggcgaccgaggcaacggcggcgacggtgagcttccagccgcaggcggcggtggccgagcagggtagctcgagcggtggtgtgctggtgccgccgccgcctatggcggcgggaggaggaggagttgtggtggcggcggcgccggtggcgggggtggtgaaggtggggaagaagagggggaggccgaggaagtatgggccggacgggagcctgatccggccgctgaacgcgacgccgatctcggcgtcggtacccatggcggcctccgcggtggggccctacacgccggcgtcggcggtgggcgccgccatgaagcgcgggaggggtcgccccctcgacttcgcctccacggccaagctccatcaccaccaccaacaccagcaccatcaccagcagcagcagttcggcttccacttcgactccattggtgaaatggtggcttgttctgctggtgcgaattttactcctcacatcatcactgttgctcctggagaggatgtgactatgaaggtcatatcattttctcaacaaggaccacgagctatctgtattctatctgctaatggtgtgatatcaaacgttacactgcgtcaacctgattcctcgggtggcacattaacttacgagggacgttttgagttgctatctttgtctggatcgtttatgcctactgaaaacagcggaacacggagtcggtcaggtgggatgagcgtttctcttgccagcccagatggccgtgttgtcggtggtggagttgctggccttctggtggcagcaagtcctgttcagattgttgtcggaagcttcctaccaagctatcaaatggaacagaagaataagaagcctagggtggaagcggcacccgcccttgcacagactcctcctgctgttccaatctctagtaccgatacgcacagcagcgagcaagggcagcacagctccgtcgccccaagaacaacaaacatcgtaacctcagcatacaacccagaccagagctgggcatctcctgctcagtcgatacctgacagcgcgagaacaccatcgggcgatgtgaaggtcaccgcctctggagcctgaaactgagatgaactgaccaggatccatgaaattcctggtctgtcactgctgcagccgcacaccatgatcgccggtggcggccaaagatggcttcatttctttctgacttgtaaaagatgtatctgagttccagtaggttttccatcttcaggcagaagagtctaactgcaattgctgtagctgtcccgatattagtcactgtttaagcatcaggctaccctgcttccttgtaacaccatgtcggtcttattggagattggagagttctgtagttacaaaattgtactattagttctgtgtgtgtgtgtgtgtgtctctaggcttctttttcattttgttggattactccacttaatttgctcctggtgtaccccttattaaattagcattagaattttttttcactctaatt

SEQ ID NO: 115 - protein, 372 aa, Oryza sativa
MEAKSGEASVAPVAVATEATAATVSFQPQAAVAEQGSSSGGVLVPPPPMAAGGGGVVVAAAPVAGVVKVGKKRGRPRKYGPDGSLIRPLNATPISASVPMAASAVGPYTPASAVGAAMKRGRGRPLDFASTAKLHHHHQHQHHHQQQQFGFHFDSIGEMVACSAGANFTPHIITVAPGEDVTMKVISFSQQGPRAICILSANGVISNVTLRQPDSSGGTLTYEGRFELLSLSGSFMPTENSGTRSRSGGMSVSLASPDGRVVGGGVAGLLVAASPVQIVVGSFLPSYQMEQKNKKPRVEAAPALAQTPPAVPISSTDTHSSEQGQHSSVAPRTTNIVTSAYNPDQSWASPAQSIPDSARTPSGDVKVTASGA

SEQ ID NO: 116 - DNA, 1011 bp, Oryza sativa
  CDS (1)..(1011)
atggccgggatggaccctggcgggggcggcgccggcgccggcagctcacggtacttccaccatctgctccgaccgcagcagccgtcgccgctgtcaccgctgtcgccgacatcccatgtcaagatggagcactccaagatgtcacccgacaagagccccgtgggcgagggagatcacgcgggagggagtggaagcggcggcgtcggcggtgaccaccagccgtcgtcgtcggccatggtgcccgtcgagggtggcagcggcagcgccggcggtagtggctcgggtgggccgacgcggcgcccgcgcgggcgcccgcccgggtccaagaacaagccgaagccgcccatcatcgtgacgcgcgacagcccgaacgcgctgcactcgcacgtgctcgaggtcgccggcggcgccgacgtcgtcgactgcgtggccgagtacgcccgccgccgagggcgcggcgtgtgcgtgctgagcggcggcggcgccgtcgtcaacgtggcgctgcggcagccgggcgcgtcgccgccgggcagcatggtggccacgctgcggggccggttcgagatcctatctctcacgggcacggtcctgccgcctcccgcgccacccggcgcgagcggcctcaccgtgttcctctccggcggccagggccaggtgatcggcggcagcgtggtgggcccgctggtcgccgcggggcccgtcgtcctgatggcggcctcattcgcgaacgccgtgtacgagcggctgccgctggagggcgaggaagaggaggtcgccgcgcccgccgccggaggcgaagcacaagatcaagtggcacaatcagctggacccccagggcagcaaccggcggcgtcacagtcctccggcgtgacaggaggcgacggcaccggcggcgccggtggcatgtcgctctacaacctcgccgggaatgtgggaggctatcagctccccggagacaacttcggaggttggagcggcgccggcgccggcggagtcaggccaccgttctga

SEQ ID NO: 117 - protein, 336 aa, Oryza sativa
MAGMDPGGGGAGAGSSRYFHHLLRPQQPSPLSPLSPTSHVKMEHSKMSPDKSPVGEGDHAGGSGSGGVGGDHQPSSSAMVPVEGGSGSAGGSGSGGPTRRPRGRPPGSKNKPKPPIIVTRDSPNALHSHVLEVAGGADVVDCVAEYARRRGRGVCVLSGGGAVVNVALRQPGASPPGSMVATLRGRFEILSLTGTVLPPPAPPGASGLTVFLSGGQGQVIGGSVVGPLVAAGPVVLMAASFANAVYERLPLEGEEEEVAAPAAGGEAQDQVAQSAGPPGQQPAASQSSGVTGGDGTGGAGGMSLYNLAGNVGGYQLPGDNFGGWSGAGAGGVRPPF

SEQ ID NO: 118 - DNA, 975 bp, Oryza sativa
  CDS (1)..(975)
atggagaggaggagtcagctgggaggaggagaaggcgatggcaagctcgtcgtcggcggcggcgccatgggcgagaagaagcagcagctggagtgcttctctgacgaggtggacagccgtgatggtggtggtggcgcggcggaggagacgacggcgggcggcggcggcgagggtgttgctgcggtggtggtggtgggtaagaggaggagggggcggccgccggggtccaagaacaagccgaagccgccggtggtcgtcacgcgtgaggcggcggcggccgagccggcggcggcggcggcgatgcggtcgcacgtgctggagatcccgggcggcggggacgtcgccggcgcgctcgcggggtacgcgcgccgccgtggcctcgggatctgcgtgctcgccgggacgggcgccgtcgccaacgtctcgctccgccacccgttgccttccggcgccgcggcggagatcggcggcggcgccgccgccgccgtggtcgtgttccacggccggtacgagatcctctccatatcggcgacgttcctcccgcccgccatggccgcggcggcgccacgcgccgcgctcggcggcctctcgatatctctcgcggggccacacggccagatcttcggaggcgccgtggcgggcccgctcgtcgccgccaccaccgtcgtcgtcgtcgccgccgcgttcgccagccccacgttccaccgcctccccgcggaatacgacgacgcgccggcgcccgtctccggcagcggcgccgacgctgacgaacaccgcgggcggcgccgaacggagccaccggagcaccatcacttgacaccgctgcatccgcgcggcatagctctggcgacggcgacgacgacgacgacgactcaacctgtgtacgcgtcagcgtgccagcatgaagaggtatggccgccggcggcggcggcggcggcggcgagcgcaccacggccacggccgccgtaccaatag

SEQ ID NO: 119 - protein, 324 aa, Oryza sativa
MERRSQLGGGEGDGKLVVGGGAMGEKKQQLECFSDEVDSRDGGGGAAEETTAGGGGEGVAAVVVVGKRRRGRPPGSKNKPKPPVVVTREAAAAEPAAAAAMRSHVLEIPGGGDVAGALAGYARRRGLGICVLAGTGAVANVSLRHPLPSGAAAEIGGGAAAAVVVFHGRYEILSISATFLPPAMAAAAPRAALGGLSISLAGPHGQIFGGAVAGPLVAATTVVVVAAAFASPTFHRLPAEYDDAPAPVSGSGADADEHRGRRRTEPPEHHHLTPLHPRGIALATATTTTTTQPVYASACQHEEVWPPAAAAAAASAPRPRPPYQ

SEQ ID NO: 120 - DNA, 918 bp, Oryza sativa
  CDS (1)..(918)
atggcaggtctcgacctcggcaccgccgcgacgcgctacgtccaccagctccaccacctccaccccgacctccagctgcagcacagctacgccaagcagcacgagccgtccgacgacgaccccaacggcagcggcggcggcggcaacagcaacggcgggccgtacggggaccatgacggcgggtcctcgtcgtcaggtcctgccaccgacggcgcggtcggcgggcccggcgacgtggtggcgcgccggccgcgggggcgcccgcctggctccaagaacaagccgaagccgccggtgatcatcacgcgggagagcgccaacacgctgcgcgcccacatcctggaggtcgggagcggctgcgacgtgttcgagtgcgtctccacgtacgcgcgccggcggcagcgcggcgtgtgcgtgctgagcggcagcggcgtggtcaccaacgtgacgctgcgtcagccgtcggcgcccgcgggcgccgtcgtgtcgctgcacgggaggttcgagatcctgtcgctctcgggctccttcctcccgccgccggctccccccggcgccaccagcctcaccatcttcctcgccgggggccagggacaggtcgtcggcggcaacgtcgtcggcgcgctctacgccgcgggcccggtcatcgtcatcgcggcgtccttcgccaacgtcgcctacgagcgcctcccactggaggaggaggaggcgccgccgccgcaggccggcctgcagatgcagcagcccggcggcggcgccgatgctggtggcatgggtggcgcgttcccgccggacccgtctgccgccggcctcccgttcttcaacctgccgctcaacaacatgcccggtggcggcggctcacagctccctcccggcgccgacggccatggctgggccggcgcacggccaccgttctga

SEQ ID NO: 121 - protein, 305 aa, Oryza sativa
MAGLDLGTAATRYVHQLHHLHPDLQLQHSYAKQHEPSDDDPNGSGGGGNSNGGPYGDHDGGSSSSGPATDGAVGGPGDVVARRPRGRPPGSKNKPKPPVIITRESANTLRAHILEVGSGCDVFECVSTYARRRQRGVCVLSGSGVVTNVTLRQPSAPAGAVVSLHGRFEILSLSGSFLPPPAPPGATSLTIFLAGGQGQVVGGNVVGALYAAGPVIVIAASFANVAYERLPLEEEEAPPPQAGLQMQQPGGGADAGGMGGAFPPDPSAAGLPFFNLPLNNMPGGGGSQLPPGADGHGWAGARPPF

SEQ ID NO: 122 - DNA, 1794 bp, Oryza sativa
  CDS (294)..(1433)
gtcgcctcgccacctccccccctgttttctccatttctcctcccaatttttttctccgcatccgcagaaattctgtcccctcctcctcctcctccatttccgatgtattttattcgatttcgagatttgttttccggtgcatagagctcacgtacaaccgccgcgccgaacggtgcatgtgaactgttcggcgaaacgcgcaggtgaggagaggtcgcgaggagcggctgctgcggcggcggcggcggcttcgattcaggtgggggtgggtgccctagggtttcgctgccgggatggatggccgggagcagcagcagcagccgcgcgtgagctcgccgccgccggccggcggcggcgtgatgatgcctcagcacccctacggcgccgcgccggcgatgccgccggggtcggcgaatgttatgcacggggtgccgctctcgttcaaccccatggcgtcgccgaccgcctcgtcgcctatgaagcccgcggatatgtcggggaccatgtaccgcaccgatcccgtcgtgcagggcatgcagcagcagcccggttccggcggtggcggcacggcggtcggcggaggggagctcgtgaagaagaagagggggaggccgaggaagtatggtcctgacgggaacatcgggttgggactgaagcccgcggctgcagcagggacggaggccggcggaccttcaggtggtgcaggatcgaactcgaaccctgacgggaagcgcagagggcgacccccaggatccgggaaaaaaaaacagctagatgctttgggatcttccgggacatcttttactccccacataataacagtgaagcctaatgaggatgttgcttcaaaaataatggcattttcacaacaaggccctcgcactacatgcataatttcagcaaatggcgctctttgcacagcaacactacgtcaaccagcaacttctggtggtatagtaacatatgagggccactttgatattctctctctgtcgggctcatttctgctcgcagaggatggcgacactcgtagcagaacaggtggtttgagtgtggcacttgctggaagcgatggacgtatagttggaggttgtgttgctggaatgctgatggcagcaacgcccgtgcaggttgtagtggggagtttcattgctgaaggtaaaaaaggcaaggaagaacatctgaaacgtgagccaacatctgccccgacgccgaaccacgcagctggctttggcgcagccacggctgccagtcctccgtctgatggatcatcaagcgaccactccgatgacccagggagtcccatgggacctaatggcagcacattcaataattcaggtcatcccatgcattcttcgtatgctcctgttagctggtcgctatctgggaatcaaggccgttacgatcccgacctgaagatgatgaccgactagataatcctgtgtttttaagctctgttagctgttgacccagtagagtgtagggatcagggattcagtgtttcctgcaccgacaccaccggcagcgttggccaataatccggtgcgctagtagtaatcagtatcacaatgcctgaacaaaagagatcaggaacaaataagtagccccagcgcatggcttggcctgtcaggtagctaatttttatttttctcaatcggtagcttatttagcatgctttgtcagttgtcagcctagttgtacggttttcttatgaatgtttgtacacctttttcttttctcgctagtattcggcgtgtacgaatcttaattaagattggaatgacatgttattgg

SEQ ID NO: 123 - protein, 379 aa, Oryza sativa
MDGREQQQQPRVSSPPPAGGGVMMPQHPYGAAPAMPPGSANVMHGVPLSFNPMASPTASSPMKPADMSGTMYRTDPVVQGMQQQPGSGGGGTAVGGGELVKKKRGRPRKYGPDGNIGLGLKPAAAAGTEAGGPSGGAGSNSNPDGKRRGRPPGSGKKKQLDALGSSGTSFTPHIITVKPNEDVASKIMAFSQQGPRTTCIISANGALCTATLRQPATSGGIVTYEGHFDILSLSGSFLLAEDGDTRSRTGGLSVALAGSDGRIVGGCVAGMLMAATPVQVVVGSFIAEGKKGKEEHLKREPTSAPTPNHAAGFGAATAASPPSDGSSSDHSDDPGSPMGPNGSTFNNSGHPMHSSYAPVSWSLSGNQGRYDPDLKMMTD

SEQ ID NO: 124 - DNA, 1516 bp, Oryza sativa
  CDS (3)..(1124)
ggatggatggccgggagcagcagcagcagccgcgcgtgagctcgccgccgccggccggcggcggcgtgatgatgcctcagcacccctacggcgccgcgccggcgatgccgccggggtcggcgaatgttatgcacggggtgccgctctcgttcaaccccatggcgtcgccgaccgcctcgtcgcctatgaagcccgcggatatgtcggggaccatgtaccgcaccgatcccgtcgtgcagggcatgcagcagcagcccggttccggcggtggcggcacggcggtcggcggaggggagctcgtgaagaagaagagggggaggccgaggaagtatggtcctgacgggaacatcgggttgggactgaagcccgcggctgcagcagggacggaggccggcggaccttcaggtggtgcaggatcgaactcgaaccctgacgggaagcgcagagggcgacccccaggatccgggaaaaaaaaacagctagatgctttgggatcttccgggacatcttttactccccacataataacagtgaagcctaatgaggatgttgcttcaaaaataatggcattttcacaacaaggccctcgcactacatgcataatttcagcaaatggcgctctttgcacagcaacactacgtcaaccagcaacttctggtggtatagtaacatatgagggccactttgatattctctctctgtcgggctcatttctgctcgcagaggatggcgacactcgtagcagaacaggtggtttgagtgtggcacttgctggaagcgatggacgtatagttggaggttgtgttgctggaatgctgatggcagcaacgcccgtgcaggttgtagtggggagtttcattgctgaaggtaaaaaaggcaaggaagaacatctgaaacgtgagccaacatctgccccgacgccgaaccacgcagctggctttggcgcagccacggctgccagtcctccgtctgatggatcatcaagcgaccactccgatgacccagggagtcccatgggacctaatgcagcacattcaataattcaggtcatcccatgcattcttcgtatgctcctgttagctggtcgctatctgggaatcaaggccgttacgatcccgacctgaagatgatgaccgactagataatcctgtgtttttaagctctgttagctgttgacccagtagagtgtagggatcagggattcagtgtttcctgcaccgacaccaccggcagcgttggccaataatccggtgcgctagtagtaatcagtatcacaatgcctgaacaaaagagatcaggaacaaataagtagccccagcgcatggcttggcctgtcaggtagctaatttttatttttctcaatcggtagcttatttagcatgctttgtcagttgtcagcctagttgtacggttttcttatgaatgtttgtacacctttttcttttctcgctagtattcggcgtgtacgaatcttaattaagattggaatgacatgttattggatattgtcgttttt

SEQ ID NO: 125 - protein, 373 aa, Oryza sativa
MDGREQQQQPRVSSPPPAGGGVMMPQHPYGAAPAMPPGSANVMHGVPLSFNPMASPTASSPMKPADMSGTMYRTDPVVQGMQQQPGSGGGGTAVGGGELVKKKRGRPRKYGPDGNIGLGLKPAAAAGTEAGGPSGGAGSNSNPDGKRRGRPPGSGKKKQLDALGSSGTSFTPHIITVKPNEDVASKIMAFSQQGPRTTCIISANGALCTATLRQPATSGGIVTYEGHFDILSLSGSFLLAEDGDTRSRTGGLSVALAGSDGRIVGGCVAGMLMAATPVQVVVGSFIAEGKKGKEEHLKREPTSAPTPNHAAGFGAATAASPPSDGSSSDHSDDPGSPMGPNAAHSIIQVIPCILRMLLLAGRYLGIKAVTIPT

SEQ ID NO: 126 - DNA, 777 bp, Oryza sativa
  CDS (1)..(777)
atggggagcatcgacggccactcgctgcagcagcatcaggggtactcccacggcggcggcgcgggagggagcaacgaggaggaggaggcgtcgccgccgcccggcggtggctcggctacggggtcggcgggccgccggccgagggggaggccgccgggctccaagaacaagccgaagccgcccgtcgtggtgacgcgggagagccccaacgcgatgcgttcccacgtgctggagatcgccagcggcgccgacatcgtcgaggccatcgcgggcttctcccgccgcaggcagcgcggcgtctccgtgctcagcgggagcggcgccgtcaccaacgtcacgctccggcagcccgcggggactggggccgccgccgtcgcgctgcgggggaggttcgagatattgtccatgtctggcgccttcctcccggcgccggcgccgccaggggccacggggctcgccgtgtacctcgccggcgggcaggggcaggtggtgggtgggagcgtcatgggggagctgatcgcgtcgggccccgtcatggtgatcgcggccacgttcggcaacgccacgtacgagaggctgccgctggaccaggaaggcgaggagggcgccgtgctgtccgggtcggagggcgccgccgcgcagatggagcagcagagcagcggaggcgccgtcgtgcccccgccgatgtacgccgccgtccagcagacgccgccgcacgacatgttcgggcagtgggggcatgcagcggtggctcggccgccgccgacatcgttctag

SEQ ID NO: 127 - protein, 258 aa, Oryza sativa
MGSIDGHSLQQHQGYSHGGGAGGSNEEEEASPPPGGGSATGSAGRRPRGRPPGSKNKPKPPVVVTRESPNAMRSHVLEIASGADIVEAIAGFSRRRQRGVSVLSGSGAVTNVTLRQPAGTGAAAVALRGRFEILSMSGAFLPAPAPPGATGLAVYLAGGQGQVVGGSVMGELIASGPVMVIAATFGNATYERLPLDQEGEEGAVLSGSEGAAAQMEQQSSGGAVVPPPMYAAVQQTPPHDMFGQWGHAAVARPPPTSF

SEQ ID NO: 128 - DNA, 870 bp, Oryza sativa
  CDS (1)..(870)
atggcaggccttgatttgggcaccagctacctccaccaccaccaatcactgcatctccgccacgacgatggcggcgccggctccgacgacggcggccacgacgacctctcgccggggagcggcggtggcggcgggcccagcagcacggccggtggcgccgggatcggcggcggcgaggtcgtcgctcgccgcccccgcggccgcccgccgggctccaagaacaagcccaagccgccggtgatcatcaccagggagagcgccaacgcgctcagggcgcatatcctcgaggtagccgccggttgcgatgtgttcgaggcgctgacggcgtacgcgcgccgccggcagcgcggggtgtgcgtgctctcggcggcggggacagtggcgaacgtcacgctccggcagccgcagtcggcgcagcccgggccggcctcgccggcggtggcgacgctgcacggcaggttcgagatactctccctcgcgggctccttcctgcccccgcccgcgccgccgggcgccaccagcctcgccgcgttcctcgccggcgggcaggggcaggtcgtcggtggcagcgtcgccggcgcgctcatcgcggcggggcccgtcgtcgtcgtcgccgcgtcgttcagcaacgtggcgtacgagaggctgccgctcgaggacggcgacgaggtggtccccccggcgccggcagggagcgaccagggcggcggcggcagcggcggcatgccaccattaggcgttgatccgtcgggcggcgccgccaccggtgggctcccgttcttcaacatgccgttcgggatgccgccaatgccggtggacggccacgccggctggcctggcgccggcgtcgggaggccaccgttctcatga

SEQ ID NO: 129 - protein, 289 aa, Oryza sativa
MAGLDLGTSYLHHHQSLHLRHDDGGAGSDDGGHDDLSPGSGGGGGPSSTAGGAGIGGGEVVARRPRGRPPGSKNKPKPPVIITRESANALRAHILEVAAGCDVFEALTAYARRRQRGVCVLSAAGTVANVTLRQPQSAQPGPASPAVATLHGRFEILSLAGSFLPPPAPPGATSLAAFLAGGQGQVVGGSVAGALIAAGPVVVVAASFSNVAYERLPLEDGDEVVPPAPAGSDQGGGGSGGMPPLGVDPSGGAATGGLPFFNMPFGMPPMPVDGHAGWPGAGVGRPPFS

SEQ ID NO: 130 - DNA, 621 bp, Oryza sativa
  CDS (1)..(621)
atgcagggaggtgtgttgggcgtggagaaagctaccgtcaccgccgtcgctgctggtggtggaggcatgggtgtaaaggaggaaatcgtgaaactgtttgaggtggccatcgtcgacgagatcactgacatgaaggacaaggcctctcgagcgcacttcgcgcggcggcagcggcgcggcatctgcgtgctcagtagggccgacgccgtgaccgacgtggccctgcgccagccggccgcgcctggcgccgtggtggcactccgtgggcggttcgagatcctgtccctgacggggacgttcctgccggggccggggccgcccggctccaccagactgaccgtgtacctcgctggcgggcaggggcaggtggtggggacgctcaccgcagctgggccggtcatggttatcgcgtccaccttcgccaacgccacctacgagaggctgccgctcgatcaggaggaggaggaagctgcggcaggcggcggaggacacatgatggcgccgccgccactcatggccggcgccgccgatcctgtactgttcggtgggggaatgcacgacgccgggcttgctacacctgcatggcaccatgcccgccctccgccgccgccgccctactag

SEQ ID NO: 131 - protein, 206 aa, Oryza sativa
MQGGVLGVEKATVTAVAAGGGGMGVKEEIVKLFEVAIVDEITDMKDKASRAHFARRQRRGICVLSRADAVTDVALRQPAAPGAVVALRGRFEILSLTGTFLPGPGPPGSTRLTVYLAGGQGQVVGTLTAAGPVMVIASTFANATYERLPLDQEEEEAAAGGGGHMMAPPPLMAGAADPVLFGGGMHDAGLATPAWHHARPPPPPPY

SEQ ID NO: 132 - DNA, 1778 bp, Arabidopsis thaliana
  CDS (358)..(1494)
ctgagatttgctttctctaccagagagactgtaacagtagtagtagctacttttgcttgttgtcttcatttcaaatctgcaattttactttctttttgagttctaagtgaactcaacatttagcttctttttcttttctaggtttcataaaaacagtttggatcttaagctcacagctgaaaataacccgactttgattactgggtatataaaagccgccattgttgttcttttcactctttgggttattagggtttacgatttctgggtggtagataaatttgttcttcaaaaaagtttccttttttaaaaaatctcttagattcttaaagaattgtaatttagggttttaaatgcatggatgggagagaagctatggcatttccaggctcgcattctcagttctatcttcagagaggagtttttaccaatcttacaccttcccaggtcgcgagtggtcttcacgcgccgccgccacctccgggaatgaggccaatgtcaaaccctaacattcaccaccctcaggctagcaatccaggacctcctttctccatggctgagcacaggcattctgatttcggacacagcattcacatggggatggcttctcctgctgcggtgcagcctactctgcagctgccgcctccaccgtcggagcaaccgatggttaagaagaaacgtggaaggccaagaaagtatgttcctgatggacaagtttcattggggctttctccaatgccttgtgttagtaaaaagtctaaggactcttcttcaatgtctgatcctaatgcacctaaaagagccagaggtcgacctcccggaactggaaggaagcaacgcttggctaatcttggtgagtggatgaatacatcagctggacttgcttttgcacctcatgtgatcagtgttggatcaggagaagatattgtttcgaaagttttgtctttttcacaaaaaagacctcgggctctttgtataatgtcaggcactggaacggtttcttcagtcactctgcgtgaacccgcttcaacaacgccttccttaacatttgagggacgttttgagattctaagtttaggtggatcttatctggtgaatgaagaaggtggatccaaaagtcgaacaggcggtttgagtgtctctctttctggtcctgaaggtcatgttatcggcggtggaattggaatgcttatcgcagccagcctcgttcaggtggtggcttgtagtttcgtgtacggagcaagtgcaaagtctaataataacaataacaagaccatcaaacaagaaataaaacctaagcaagagccgaccaatagcgaaatggagaccacacctggtagtgcaccagaagctgcagcatcgacgggtcagcatacgccacagaacttcccagctcagggaatgagcggatggcccgtttcaggctcaggctcaggcagatcacttgactctagcagaaacccactcactgatattgacttgactcgcgggtgattcaaaacaaaaacattattagtctttcttcctatttactccgactactaccctttagtcttggaagcagcagcagcagcatacattatgtgagtgctgtacatatctttgttgttgtagatttctctctgggaatgttaaaaccagacatttcaggattgagaccagaactctcagttccttattgtaacattctcaatgtaacagaaccaccccactttcaggctactcaacgagattgtaactcttttatatcactcattaaagcttcctttggtttcttc

SEQ ID NO: 133 - protein, 378 aa, Arabidopsis thaliana
MDGREAMAFPGSHSQFYLQRGVFTNLTPSQVASGLHAPPPPPGMRPMSNPNIHHPQASNPGPPFSMAEHRHSDFGHSIHMGMASPAAVQPTLQLPPPPSEQPMVKKKRGRPRKYVPDGQVSLGLSPMPCVSKKSKDSSSMSDPNAPKRARGRPPGTGRKQRLANLGEWMNTSAGLAFAPHVISVGSGEDIVSKVLSFSQKRPRALCIMSGTGTVSSVTLREPASTTPSLTFEGRFEILSLGGSYLVNEEGGSKSRTGGLSVSLSGPEGHVIGGGIGMLIAASLVQVVACSFVYGASAKSNNNNNKTIKQEIKPKQEPTNSEMETTPGSAPEAAASTGQHTPQNFPAQGMSGWPVSGSGSGRSLDSSRNPLTDIDLTRG

SEQ ID NO: 134 - DNA, 846 bp, Arabidopsis thaliana
  CDS (1)..(846)
  misc_feature (403)..(405): Xaa encoded is Ile or Thr
atggcaaacccttggtggacgaaccagagtggtttagcgggcatggtggaccattcggtctcctcaggccatcaccaaaaccatcaccaccaaagtcttcttaccaaaggagatcttggaatagccatgaatcagagccaagacaacgaccaagacgaagaagatgatcctagagaaggagccgttgaggtggtcaaccgtagaccaagaggtagaccaccaggatccaaaaacaaacccaaagctccaatctttgtgacaagagacagccccaacgcactccgtagccatgtcttggagatctccgacggcagtgacgtcgccgacacaatcgctcacttctcaagacgcaggcaacgcggcgtttgcgttctcagcgggacaggctcagtcgctaacgtcaycctccgccaagccgccgcaccaggaggtgtggtctctctccaaggcaggtttgaaatcttatctttaaccggtgctttcctccctggaccttccccacccgggtcaaccggtttaacggtttacttagccggggtccagggtcaggtcgttggaggtagcgttgtaggcccactcttagccatagggtcggtcatggtgattgctgctactttctctaacgctacttatgagagattgcccatggaagaagaggaagacggtggcggctcaagacagattcacggaggcggtgactcaccgcccagaatcggtagtaacctgcctgatctatcagggatggccgggccaggctacaatatgccgccgcatctgattccaaatggggctggtcagctagggcacgaaccatatacatgggtccacgcaagaccaccttactga

SEQ ID NO: 135 - protein, 281 aa, Arabidopsis thaliana
  MISC_FEATURE (135)..(135): Xaa is Ile or Thr
MANPWWTNQSGLAGMVDHSVSSGHHQNHHHQSLLTKGDLGIAMNQSQDNDQDEEDDPREGAVEVVNRRPRGRPPGSKNKPKAPIFVTRDSPNALRSHVLEISDGSDVADTIAHFSRRRQRGVCVLSGTGSVANVXLRQAAAPGGVVSLQGRFEILSLTGAFLPGPSPPGSTGLTVYLAGVQGQVVGGSVVGPLLAIGSVMVIAATFSNATYERLPMEEEEDGGGSRQIHGGGDSPPRIGSNLPDLSGMAGPGYNMPPHLIPNGAGQLGHEPYTWVHARPPY

SEQ ID NO: 136 - DNA, 798 bp, Oryza sativa
  CDS (1)..(798)
atggccgacgaggggtcgtcgcgcgccgagctgatcgaggcttcgccggcgccggcgctggaccttccgtcgccgccgcggaagccgcggggccggccgctggggtccaagaacaagcccaagccgccggtggtcgtgacgcgggagagcgaggcggcgatgcggcccgtcgtgctggagctcggcgccggctgcgaggtggccgccgcggtggccgcgttcgcgcggcgccgacgcgtcggcgtgtccgtgctctgcggccgcggcaccgtcgccgccgtcacgctccggctcccgacctcgccgcccgccgcggtgaagctgcacgggcggttcgaggtgctgtccctgtccgggacggtgctgccgtccgcggccggagagggggccgcgccgccgccgccgttctcggtgtctctagctggggcgggcgggcaggtgatcggcggcacgctcgccggggagatgacgacggcggacgggttggtggtggtggccgccacgttcgggagcgccgaggtgcaccggttgcccgctgatgaggacgacgaggccaccggcagccgcggcggtgaggagcggaggcatccacagcagcagccgccgcagacggtggcggccacgagcgccgtcgacgtggggctgcttgggtacggcggcggtgtgggggttgccggcggtgcgagtggcgggcaggtgggccgccaccagcagcagcagcagcaggccgagatggtcttgtgggcccagtcgccaggctcagtcggcccggcccatcctgccacgagtcgttactag

SEQ ID NO: 137 - protein, 265 aa, Oryza sativa
MADEGSSRAELIEASPAPALDLPSPPRKPRGRPLGSKNKPKPPVVVTRESEAAMRPVVLELGAGCEVAAAVAAFARRRRVGVSVLCGRGTVAAVTLRLPTSPPAAVKLHGRFEVLSLSGTVLPSAAGEGAAPPPPFSVSLAGAGGQVIGGTLAGEMTTADGLVVVAATFGSAEVHRLPADEDDEATGSRGGEERRHPQQQPPQTVAATSAVDVGLLGYGGGVGVAGGASGGQVGRHQQQQQQAEMVLWAQSPGSVGPAHPATSRY

SEQ ID NO: 138 - DNA, 1602 bp, Oryza sativa
  CDS (385)..(1602)
cctccacctttgccctcctgcattttgcttgcaaaggataggagttgcagtactagtattgctctctcattgcatgtgaagctagcaagcaagcaagcaagagagagattctaggtgagtggtgtttggtgtgaagggaaggagcatggtgatggtggcatggctgatctgctgctaatagcaaggagtagtagtaataataatactactagtcactcatcatccttctccctcccttgagcttagctatagagtggagaagaaagaaaggagagtagtcaaagcgactctttctttgttttcttgcgcttcctcctcggctgagctcagcagcaagcaaacctgctcctgctacagcagcgagcgagcgctagatctgaccaaatggaggccaaggacgtctcgccgctcgtcaccgtcccgcccgcgcccgccgccgccgcgccgccacctgcggcagcgcccgcgccgccgccgtcccagccgccgccgccgccgctgccgttcgcgcagcaggcgccgccgccggccgccaaccccgcggcggcgcccatgcggctgtcgttcgaccagatggcagggaaggcgcccgggggggagcagcagcaccaccaccacccggggcccatgctgtacgcggcggcgcccgcgggcggcgccgcgccgccgccgcagggcggcaatgtgatgggcatgggcgagctgatgcgcaagaagcgcggccgcccgcgcaagtacgcgcccgacgggagcatggcgctcgcgctcgcccccatctcctccgcctccggcggcgccgcgccgccgcctccgccgccagggcaccagccgcacggcttctccatcagcagcccggcgtcggatccgaacgccaagcgccgcggccggccacccggctccggcaagaagaagcagttcgaagccctaggctcatggggcatcgccttcactcctcacatcctcaccgtcaaggccggcgaggatgttgcttcaaaaattatggccttctcacagcaaggccctcgcacagtttgcattctctcagcgaatggtgcaataagcaatgtaacacttcggcagccagctacatctggtggacttgtgacttatgagggccgatttgagatcatctctctatcaggttctttcctgcttgcagaggatggcgacactcgcagcaggactggtggcctgagtgtcgcacttgcaggatctgatggccgagttcttggtggatgtgtagctggaatgctgatggccgcaacccctgtccaggttgtcgtggctagcttcatcgcggaaggtaagaaatcgaagccagtcgagacaaggaaggtcgaaccgatgtcagcgcctccacagatggcaacctacgtgccagctccggtggcgagcccgccatcggagggcacatccagtggatcgtccgatgactcgggcagcccgatcaaccacagcgggatgccgtacaaccactccgggcagcagcagcaacaccagcagcaccagcacatgccccctgcttacgcatccggtggctggtcgctctcagctcatcatcagaacaggcacgactctgacatgaagatgatgtcgaactaa

SEQ ID NO: 139 - protein, 405 aa, Oryza sativa
MEAKDVSPLVTVPPAPAAAAPPPAAAPAPPPSQPPPPPLPFAQQAPPPAANPAAAPMRLSFDQMAGKAPGGEQQHHHHPGPMLYAAAPAGGAAPPPQGGNVMGMGELMRKKRGRPRKYAPDGSMALALAPISSASGGAAPPPPPPGHQPHGFSISSPASDPNAKRRGRPPGSGKKKQFEALGSWGIAFTPHILTVKAGEDVASKIMAFSQQGPRTVCILSANGAISNVTLRQPATSGGLVTYEGRFEIISLSGSFLLAEDGDTRSRTGGLSVALAGSDGRVLGGCVAGMLMAATPVQVVVASFIAEGKKSKPVETRKVEPMSAPPQMATYVPAPVASPPSEGTSSGSSDDSGSPINHSGMPYNHSGQQQQHQQHQHMPPAYASGGWSLSAHHQNRHDSDMKMMSN

SEQ ID NO: 140 - DNA, 831 bp, Arabidopsis thaliana
  CDS (1)..(831)
atgaaaggtgaatacagagagcaaaagagtaacgaaatgttttccaagcttcctcatcatcaacaacaacagcaacaacaacaacaacaacactctcttacctctcacttccacctctcctccaccgtaacccccaccgtcgatgactcctccatcgaagtggtccgacgtccacgtggcagaccaccaggttccaaaaacaaacctaaaccacccgtcttcgtcacacgtgacaccgaccctcctatgagtccttacatcctcgaagttccttcaggaaacgacgtcgtcgaagccatcaaccgtttctgccgccgtaaatccatcggagtctgcgtccttagtggctctggctctgtagctaacgtcactttacgtcagccatcaccggcagctcttggctctaccataactttccatggaaagtttgatctcctctccgtctccgcaacgtttctccctcctccgcctcgtacttccttgtctcctcccgtttctaacttcttcaccgtctctctcgctggacctcaaggacaaatcatcggagggttcgtcgctggtccacttatttcggcaggaacagtttacgtcatcgccgcaagtttcaacaacccttcttatcaccggttaccggcggaagaagagcaaaaacactcggcggggacaggggaaagagagggacaatctccgccggtctctggtggcggtgaagagtcaggacagatggcgggaagtggaggagagtcgtgtggggtatcaatgtacagttgccacatgggtggctctgatgttatttgggcccctacagccagagctccaccgccatactaa

SEQ ID NO: 141 - protein, 276 aa, Arabidopsis thaliana
MKGEYREQKSNEMFSKLPHHQQQQQQQQQQHSLTSHFHLSSTVTPTVDDSSIEVVRRPRGRPPGSKNKPKPPVFVTRDTDPPMSPYILEVPSGNDVVEAINRFCRRKSIGVCVLSGSGSVANVTLRQPSPAALGSTITFHGKFDLLSVSATFLPPPPRTSLSPPVSNFFTVSLAGPQGQIIGGFVAGPLISAGTVYVIAASFNNPSYHRLPAEEEQKHSAGTGEREGQSPPVSGGGEESGQMAGSGGESCGVSMYSCHMGGSDVIWAPTARAPPPY

SEQ ID NO: 142 - DNA, 1343 bp, Arabidopsis thaliana
  CDS (236)..(1183)
ttagtatcattctttgtcgtgttcttttaattaaccttttgcaatttgtcttgtgtttctcacaacacaaaaacttgtaaaagtgttaaaaaatcaagatctgaaaaatcttatcaccgcttctaggtttttcagttttttttcttccttttcctgatctaaattaacttatatttcttagggtttcacttcttgaaacatttaatcagaattaattaacctctctagggctttcatggcgaatccatggtggacaggacaagtgaacctatccggcctcgaaacgacgccgcctggttcctctcagttaaagaaaccagatctccacatctccatgaacatggccatggactcaggtcacaataatcatcaccatcaccaagaagtcgataacaacaacaacgacgacgatagagacaacttgagtggagacgaccacgagccacgtgaaggagccgtagaagcccccacgcgccgtccacgtggacgtcctgctggttccaagaacaaaccaaagccaccgatcttcgtcactcgcgattctccaaatgctctcaagagccatgtcatggagatcgctagtgggactgacgtcatcgaaaccctagctacttttgctaggcggcgtcaacgtggcatctgcatcttgagcggaaatggcacagtggctaacgtcaccctccgtcaaccctcgaccgctgccgttgcggcggctcctggtggtgcggctgttttggctttacaagggaggtttgagattctttctttaaccggttctttcttgccaggaccggctccacctggttccaccggtttaacgatttacttagccggtggtcaaggtcaggttgttggaggaagcgtggtgggcccattgatggcagcaggtccggtgatgctgatcgccgccacgttctctaacgcgacttacgagagattgccattggaggaggaagaggcagcagagagaggcggtggtggaggcagcggaggagtggttccggggcagctcggaggcggaggttcgccactaagcagcggtgctggtggaggcgacggtaaccaaggacttccggtgtataatatgccgggaaatcttgtttctaatggtggcagtggtggaggaggacagatgagcggccaagaagcttatggttgggctcaagctaggtcaggattttaacgtgcgttaaaatggtttttaatttacagaagttaacaataagattataatgatgtttattatgatgatgaaaaccagtcagttgctacttgttactagtgagctatatagtttgtggacattatattatgttctctcttgactatgattattatttgct

SEQ ID NO: 143 - protein, 315 aa, Arabidopsis thaliana
MANPWWTGQVNLSGLETTPPGSSQLKKPDLHISMNMAMDSGHNNHHHHQEVDNNNNDDDRDNLSGDDHEPREGAVEAPTRRPRGRPAGSKNKPKPPIFVTRDSPNALKSHVMEIASGTDVIETLATFARRRQRGICILSGNGTVANVTLRQPSTAAVAAAPGGAAVLALQGRFEILSLTGSFLPGPAPPGSTGLTIYLAGGQGQVVGGSVVGPLMAAGPVMLIAATFSNATYERLPLEEEEAAERGGGGGSGGVVPGQLGGGGSPLSSGAGGGDGNQGLPVYNMPGNLVSNGGSGGGGQMSGQEAYGWAQARSGF

SEQ ID NO: 144 - DNA, 24 bp, Artificial sequence
  Primer
atggaaaccgtcgggcgtccacgt

SEQ ID NO: 145 - DNA, 22 bp, Artificial sequence
  Primer
tcagtacggcgatggagctttg

SEQ ID NO: 146 - protein, 186 aa, Unknown
  Consensus sequence
  MISC_FEATURE (2)..(183): xaa located in positions 2, 7, 10, 13, 15-27, 53-58, 60, 62-74,; 77, 79,82, 83, 85, 87, 90, 95-102, 124, 126, 127, 130-138,; 145-147, 151, 152, 154, 156,159, 161, 163, 165, 167, 168,
  171-173, 175, 176 and 178-183; each xaa is any amino acid.
  MISC_FEATURE (28)..(143): xaa located in positions 28-51, 103-115 and 139-143; each xaa
  is any or no amino acid
RXRGRPXGSXNKXKXXXXXXXXXXXXXXXXXXXXXXXXXXXXXXXXXXXXXHXXXXXXGXDXXXXXXXXXXXXXRGXCXLSXXGXVXNVXLRQPXXXXXXXXXXXXXXXXXXXXXGRFEILSLXGXXLPXXXXXXXXXXXXXXLXXXLAGXXGXVXGGXVXGXLXAXXPVXXXAXXFXXXXXXRLP

SEQ ID NO: 147 - protein, 21 aa, Unknown
  Consensus sequence
  MISC_FEATURE (1)..(1): xaa in position 1 is Arg, Lys or Gly
  MISC_FEATURE (2)..(2): xaa in position 2 is Arg or Lys
  MISC_FEATURE (3)..(8): xaa located in positions 3 and 8; each xaa is any amino acid
  MISC_FEATURE (9)..(9): xaa in position 9 is Gly, Glu or Asp
  MISC_FEATURE (10)..(10): xaa in position 10 is Ser, Phe, Thr or Ala
  MISC_FEATURE (11)..(11): xaa in position 11 is Lys, Gly, Ser or Thr
  MISC_FEATURE (12)..(12): xaa in position 12 is Asn or Lys
  MISC_FEATURE (13)..(13): xaa in position 13 is Lys or Arg
  MISC_FEATURE (14)..(14): xaa in position 14 is Pro, Lys, Ala or Gln
  MISC_FEATURE (15)..(15): xaa in position 15 is Lys, Gln or Arg
  MISC_FEATURE (16)..(16): xaa in position 16 is any amino acid
  MISC_FEATURE (17)..(17): xaa in position 17 is Pro, Asp, Ala or Glu
  MISC_FEATURE (18)..(18): xaa in position 18 is any amino acid
  MISC_FEATURE (19)..(19): xaa in position 19 is Ile, Phe, Val or Leu
  MISC_FEATURE (20)..(20): xaa in position 20 is Val, Ile or Gly
  MISC_FEATURE (21)..(21): xaa in position 21 is Thr, Ser or Glu
XXXRGRPXXXXXXXXXXXXXX

SEQ ID NO: 148 - protein, 43 aa, Unknown
  Consensus sequence
  MISC_FEATURE (1)..(1): xaa in position 1 is His, Tyr or Asn
  MISC_FEATURE (2)..(2): xaa in position 2 is Val, Ile or Ala
  MISC_FEATURE (3)..(3): xaa in position 3 is Leu, Met, Ile or Val
  MISC_FEATURE (4)..(4): xaa in position 4 is Glu, Thr, Ser or Asp
  MISC_FEATURE (5)..(5): xaa in position 5 is Val, Ile, Glu or Leu
  MISC_FEATURE (6)..(7): xaa in position 6 to 7 is any amino acid
  MISC_FEATURE (8)..(8): xaa in position 8 is Gly, Asn, Ala or Asp
  MISC_FEATURE (9)..(9): xaa in position 9 is any amino acid
  MISC_FEATURE (10)..(10): xaa in position 10 is Asp, Lys or Glu
  MISC_FEATURE (11)..(11): xaa in position 11 is Val, Ile, Asp or Leu
  MISC_FEATURE (12)..(14): xaa in position 12 to 14 is any amino acid
  MISC_FEATURE (15)..(15): xaa in position 15 is Ile, Val or Leu
  MISC_FEATURE (16)..(17): xaa in position 16 to 17 is any amino acid
  MISC_FEATURE (18)..(18): xaa in position 18 is Phe or Tyr
  MISC_FEATURE (19)..(19): xaa in position 19 is Ala, Ser or Cys
  MISC_FEATURE (20)..(20): xaa in position 20 is Arg, Gln, Thr or Asn
  MISC_FEATURE (21)..(21): xaa in position 21 is any amino acid
  MISC_FEATURE (22)..(22): xaa in position 22 is Arg, Gly, Lys or Gln
  MISC_FEATURE (23)..(24): xaa in position 23 to 24 is any amino acid
  MISC_FEATURE (25)..(25): xaa in position 25 is Gly, Ala or Thr
  MISC_FEATURE (26)..(26): xaa in position 26 is any amino acid
  MISC_FEATURE (27)..(27): xaa in position 27 is Cys or Ser
  MISC_FEATURE (28)..(28): xaa in position 28 is Val or Ile
  MISC_FEATURE (29)..(29): xaa in position 29 is Leu, Met or Ile
  MISC_FEATURE (30)..(30): xaa in position 30 is any amino acid
  MISC_FEATURE (31)..(31): xaa in position 31 is Gly, Ala or Arg
  MISC_FEATURE (32)..(32): xaa in position 32 is any amino acid;
  MISC_FEATURE (33)..(33): xaa in position 33 is Gly or Asp
  MISC_FEATURE (34)..(34): xaa in position 34 is any amino acid
  MISC_FEATURE (35)..(35): xaa in position 35 is Val, Ile or Leu
  MISC_FEATURE (36)..(37): xaa in position 36 to 37 is any amino acid
  MISC_FEATURE (38)..(38): xaa in position 38 is Val or Ala
  MISC_FEATURE (39)..(39): xaa in position 39 is Thr, Ala or Ser
  MISC_FEATURE (40)..(40): xaa in position 40 is Leu, Ile or Val
  MISC_FEATURE (42)..(42): xaa in position 42 is Gln, His, Glu or Leu
  MISC_FEATURE (43)..(43): xaa in position 43 is Pro, Ala or Thr
XXXXXXXXXXXXXXXXXXXXXXXXXXXXXXXXXXXXXXXXRXX

SEQ ID NO: 149 - protein, 20 aa, Unknown
  Consensus sequence
  MISC_FEATURE (1)..(1): xaa in position 1 is Gly, Ala, Ser or Thr
  MISC_FEATURE (2)..(3): xaa in position 2 to 3 is any amino acid
  MISC_FEATURE (4)..(4): xaa in position 4 is Val, Ile, Leu or Ala
  MISC_FEATURE (5)..(5): xaa in position 5 is any amino acid
  MISC_FEATURE (6)..(6): xaa in position 6 is Leu, Tyr or Phe
  MISC_FEATURE (7)..(7): xaa in position 7 is His, Arg, Glu or Gln
  MISC_FEATURE (9)..(9): xaa in position 9 is Arg, Lys, Thr or His
  MISC_FEATURE (10)..(10): xaa in position 10 is Phe or Tyr
  MISC_FEATURE (11)..(11): xaa in position 11 is Glu or Asp
  MISC_FEATURE (12)..(12): xaa in position 12 is Ile, Leu or Val
  MISC_FEATURE (13)..(13): xaa in position 13 is Leu or Ile
  MISC_FEATURE (15)..(15): xaa in position 15 is Leu, Met, Val or Ile
  MISC_FEATURE (16)..(16): xaa in position 16 is Ser, Thr, Gly or Ala
  MISC_FEATURE (17)..(17): xaa in position 17 is Gly or Ala
  MISC_FEATURE (18)..(18): xaa in position 18 is Ser, Thr or Ala
  MISC_FEATURE (19)..(19): xaa in position 19 is any amino acid,
  MISC_FEATURE (20)..(20): xaa in position 20 is Leu, Met or Ile
XXXXXXXGXXXXXSXXXXXX

SEQ ID NO: 150 - protein, 34 aa, Unknown
  Consensus sequence
  MISC_FEATURE (1)..(1): xaa in position 1 is Leu, Phe or Met
  MISC_FEATURE (2)..(2): xaa in position 2 is Thr, Ser, Ala or Lys
  MISC_FEATURE (3)..(3): xaa in position 3 is Val, Ile or Ala
  MISC_FEATURE (4)..(4): xaa in position 4 is Tyr, Phe, Ser or Ala
  MISC_FEATURE (6)..(6): xaa in position 6 is Ala, Ser or Gly
  MISC_FEATURE (7)..(7): xaa in position 7 is Gly or Ser
  MISC_FEATURE (8)..(9): xaa in position 8 to 9 is any amino acid
  MISC_FEATURE (11)..(11): xaa in position 11 is Gln, Arg, His or Lys
  MISC_FEATURE (12)..(12): xaa in position 12 is Val, Ile, Leu or Met
  MISC_FEATURE (13)..(13): xaa in position 13 is any amino acid
  MISC_FEATURE (16)..(16): xaa in position 16 is any amino acid
  MISC_FEATURE (17)..(17): xaa in position 17 is Val, Gly or Leu
  MISC_FEATURE (18)..(18): xaa in position 18 is Val, Ala, Met or Ile
  MISC_FEATURE (19)..(19): xaa in position 19 is Gly or Ala
  MISC_FEATURE (20)..(20): xaa in position 20 is any amino acid
  MISC_FEATURE (21)..(21): xaa in position 21 is Leu or Met
  MISC_FEATURE (22)..(22): xaa in position 22 is Ile, Val, Met or Leu
  MISC_FEATURE (23)..(23): xaa in position 23 is Ala, Cys, Ser or Thr
  MISC_FEATURE (24)..(24): xaa in position 24 is Ala, Ser or Ile
  MISC_FEATURE (25)..(26): xaa in position 25 to 26 is any amino acid
  MISC_FEATURE (27)..(27): xaa in position 27 is Val or Leu
  MISC_FEATURE (28)..(28): xaa in position 28 is any amino acid
  MISC_FEATURE (29)..(29): xaa in position 29 is Val, Leu, Ile or Phe
  MISC_FEATURE (30)..(30): xaa in position 30 is Ile, Met or Val
  MISC_FEATURE (31)..(31): xaa in position 31 is Ala or Val
  MISC_FEATURE (32)..(32): xaa in position 32 is any amino acid
  MISC_FEATURE (33)..(33): xaa in position 33 is Ser, Thr or Ala
XXXXLXXXXGXXXGGXXXXXXXXXXXXXXXXXXF

SEQ ID NO: 151 - DNA, 2550 bp, Arabidopsis thaliana
  CDS (1)..(2550)
atgtcgaagctgaggaaaaagtatctggaacatcttctatgtgtgttgattttctttacttatgttattggctatggagaagctcagtccaagagcttccttgtagattgtggctcaaatgctacaaccgaagtagatggaagaacatgggttggtgatttatctcccaacaagagtgtgaccctgcaaggatttgatgccattactgcttcgacatcgaaaggaagttctgtttacgctgagatatataagactgctcgtgttttcgacgctgtgttgaactatacatttgaaggtataactcaagggaattactttgttaggctccatttcagccctttcgctattgaaaaccacaatgtgaatgagtcttctttcagcgtctttgcggatggtctgagactgatgcttgacatcaacatcgcgggagaaatcgcgcataagaatctcatcttggaaagcactggtcacaatgctactgcctcttctttggttaaagagtttctgttacctactggaccaggaaaactggttttaagtttcatcccggagaaagggtctttcgggtttgtcaatgctattgagatagtctctgttgatgataagctttttaaggaatcagttactaaagttggtggaagtgaagtggagcttggtttgggtggacgagggattgaaactatgtataggctaaacgttggtggtcccaagctaggtccaagcaaagatcttaagctttatagaacatgggaaacagatttaagctacatggtgattgagaacgctggtgtagaagtcaagaacagctcaaatatcacatatgctttggctgatgattctcctgtggctcctcttcttgtttatgaaactgctaggatgatgtcaaacactgaagtcttggagaaacggttcaacatttcttggaagtttgaagttgatcctaatttcgactacttggttaggcttcatttctgtgagcttcttgttgataagcaaaaccagaggattttcaggatatacataaacaaccagacggctgctggtaatttcgatatatttgctcacgcgggcgggaagaacaaaggtatatatcaagattacttggatccggtctcctctaagaacgacgttctctggattcaacttggacctgactcatctgttggtgcttctggagacgctcttctgagtggtcttgagattttcaagctcagcaaaaatgggaatcttgctcatctcatcaggtttgattcgactggtcactcggtaagtgactcgaagatgcggattatttggatcagtgttggtgctggtatagcaattatcatttttttcgtgttcttgggaatcttggtagtatgtttatgcaagaaaaggcgaagcaaatcagatgagtcgaaaaacaatcctcccgggtggcgtccgttgtttttgcatgtcaataacagtactgcaaacgccaaagcaacgggaggctcgctgagactgaacactcttgcagcatctacaatgggaaggaagtttacactagccgagattcgtgcagcaactaagaactttgatgatggtttagctattggagttggagggtttggtaaggtttacagaggagagcttgaagatggaacactcatagctataaaacgagccaccccacattctcagcaagggcttgctgaattcgaaaccgagatcgtgatgctctcaagacttaggcataggcatcttgtgtctttgatcgggttctgcgatgagcacaatgagatgatcttggtttatgaatacatggcaaatggaactctcaggagtcatctctttggaagcaaccttccgccattatcatggaagcaacggcttgaagcttgtataggctctgcgagaggattgcattaccttcacacagggtcagagagaggaatcattcacagagatgtcaaaacaacaaacatactattagacgagaactttgtggcaaagatgtctgattttgggctgtcgaaagctggaccgtccatggaccatactcatgtgagtacagctgtgaaaggaagttttggttatcttgatcctgaatactttagaaggcaacagttaacagagaagtcagatgtttactcttttggtgttgtgttgttcgaagctgtttgtgctcgagctgttataaacccaactttgcctaaagaccagatcaaccttgcggaatgggctttaagctggcaaaaacagagaaacctcgagtccatcatcgactcaaatctgaggggaaactacagtcctgaatcgttggagaagtatggggagatagcagagaagtgcttagcggatgaagggaagaacaggccaatgatgggagaagtgttatggagcttggagtatgttttgcagattcatgaagcttggcttcgcaaacagaatggagaaaactcgttttcgagcagccaagcggtagaagaagcaccagagagctttactcttccagcttgttccaatcaagattcctcagaaactgagcagagccaaacaggatctgctcttcacaattcggcttag

SEQ ID NO: 152 - protein, 849 aa, Arabidopsis thaliana
MSKLRKKYLEHLLCVLIFFTYVIGYGEAQSKSFLVDCGSNATTEVDGRTWVGDLSPNKSVTLQGFDAITASTSKGSSVYAEIYKTARVFDAVLNYTFEGITQGNYFVRLHFSPFAIENHNVNESSFSVFADGLRLMLDINIAGEIAHKNLILESTGHNATASSLVKEFLLPTGPGKLVLSFIPEKGSFGFVNAIEIVSVDDKLFKESVTKVGGSEVELGLGGRGIETMYRLNVGGPKLGPSKDLKLYRTWETDLSYMVIENAGVEVKNSSNITYALADDSPVAPLLVYETARMMSNTEVLEKRFNISWKFEVDPNFDYLVRLHFCELLVDKQNQRIFRIYINNQTAAGNFDIFAHAGGKNKGIYQDYLDPVSSKNDVLWIQLGPDSSVGASGDALLSGLEIFKLSKNGNLAHLIRFDSTGHSVSDSKMRIIWISVGAGIAIIIFFVFLGILVVCLCKKRRSKSDESKNNPPGWRPLFLHVNNSTANAKATGGSLRLNTLAASTMGRKFTLAEIRAATKNFDDGLAIGVGGFGKVYRGELEDGTLIAIKRATPHSQQGLAEFETEIVMLSRLRHRHLVSLIGFCDEHNEMILVYEYMANGTLRSHLFGSNLPPLSWKQRLEACIGSARGLHYLHTGSERGIIHRDVKTTNILLDENFVAKMSDFGLSKAGPSMDHTHVSTAVKGSFGYLDPEYFRRQQLTEKSDVYSFGVVLFEAVCARAVINPTLPKDQINLAEWALSWQKQRNLESIIDSNLRGNYSPESLEKYGEIAEKCLADEGKNRPMMGEVLWSLEYVLQIHEAWLRKQNGENSFSSSQAVEEAPESFTLPACSNQDSSETEQSQTGSALHNSA

SEQ ID NO: 153 - DNA, 1665 bp, Arabidopsis thaliana (mouse-ear cress)
  CDS (1)..(1665)
atggacaatgatgacgatgctgatgagtatactgtgcagaacacatccaggttatcagttaatgcttcctctcccagctttggactttataggacagctcgagtctctcctttatcgttgacttactacggaatctgtcttggaaatgggaactacactgtgaatctccactttgctgagatcatctttaccgatgacaatacattatacagtctcggcaaacgtttgtttgatatttatgttcaggatcagttggtgattaaaaactttaacattcaagaagctgctcgaggatcaggtaagccaatcattaaatcgtttctggtaaatgtaacggaccatactctgaagattggtttgcgatgggctggcaaagggacaacaggcattccgattagaggggtatatggtcctatgatttcagctatatctgtggaacccaatttcaaacctccggtatattatgacacaaaggatatcatactaaaagtgggggtacctgtcgctgcagcaacacttcttttgtttatcatagtgggtgtattctggaaaaaaaggcgtgacaaaaatgatattgacaaaggtataaggggtctagatcttcaaactggaacttttactctacggcagataaaagcagccactgataatttcgatgtaacaagaaagattggtgaaggtggatttggctctgtttacaagggtgaattatctgaggggaaattaattgcagttaaacaactgtctgcaaaatcgaggcagggaaatcgcgagtttgtaaatgagataggaatgatctcagctcttcaacatccgaatcttgtgaagctatatggatgttgtgttgaaggaaaccaattgatattggtgtatgagtacttggagaacaactgtctatctcgagcgttatttggaaaggatgagagttctagactgaaactagactggtcaacaaggaagaagatttttttggggatagccaagggactgacatttctccatgaagaatctaggataaagattgtacacagagatataaaggcaagcaatgtgttactcgataaggatctcaacgctaaaatttctgactttggtttggcaaagctgaatgatgatggaaacacacacatcagcactcgtattgcaggaactataggttatatggctcctgaatatgcaatgcgtggttacttgactgaaaaagcggatgtttatagcttcggcgtcgttgcactcgaaatcgttagtggaaagagtaacacaaactttaggccaaccgaggactttgtttaccttcttgattgggcttacgttttgcaagagagaggaagcttactagagctggttgatccaacgttagcctcagattactcagaagaggaagccatgttgatgctgaacgtggcattgatgtgcactaacgcatcaccgactctaaggcctacaatgtcgcaggtggtgagtctcatagaggggaagacagcgatgcaagagttgctgtcggatccgagcttctcaacggttaacccgaagcttaaagccttgaggaaccatttttggcaaaacgagctgagcagatcgcttagcttctccacaagcgggcctcgtactgcctctgctaactcactcgttgatgcagaggagaaaaccggacttttggattaa

SEQ ID NO: 154 - protein, 554 aa, Arabidopsis thaliana (mouse-ear cress)
MDNDDDADEYTVQNTSRLSVNASSPSFGLYRTARVSPLSLTYYGICLGNGNYTVNLHFAEIIFTDDNTLYSLGKRLFDIYVQDQLVIKNFNIQEAARGSGKPIIKSFLVNVTDHTLKIGLRWAGKGTTGIPIRGVYGPMISAISVEPNFKPPVYYDTKDIILKVGVPVAAATLLLFIIVGVFWKKRRDKNDIDKGIRGLDLQTGTFTLRQIKAATDNFDVTRKIGEGGFGSVYKGELSEGKLIAVKQLSAKSRQGNREFVNEIGMISALQHPNLVKLYGCCVEGNQLILVYEYLENNCLSRALFGKDESSRLKLDWSTRKKIFLGIAKGLTFLHEESRIKIVHRDIKASNVLLDKDLNAKISDFGLAKLNDDGNTHISTRIAGTIGYMAPEYAMRGYLTEKADVYSFGVVALEIVSGKSNTNFRPTEDFVYLLDWAYVLQERGSLLELVDPTLASDYSEEEAMLMLNVALMCTNASPTLRPTMSQVVSLIEGKTAMQELLSDPSFSTVNPKLKALRNHFWQNELSRSLSFSTSGPRTASANSLVDAEEKTGLLD

SEQ ID NO: 155 - DNA, 2565 bp, Arabidopsis thaliana (mouse-ear cress)
  CDS (1)..(2565)
atggggagtcttgccacttgtcaacatgtacatacacatatctccatagctgctcataccatttcaatatatattggacttactttgttgatgaaatgcagttggcttctcggaaaccgattaacaggtccaatccctaaggagtttggaaacattacaactcttactagcctaagtaacttaatcaaaaaaacttatgattttagtgtcttggaagccaatcaactttcaggagaattacctcttgagctagggaatctaccaaacattcaacaaatgattcttagctcgaataactttaatggtgaaattccatctacatttgcaaaactaaccaccttgagagattttcgtgtaagtgacaaccagttgtcaggaacaattccagatttcatccaaaaatggactaagcttgagcgactgtttattcaagcaagtggtttagttggaccaattcccattgccattgcttctctcgtagagttaaaagacttgagaatcagcgatttgaatggacccgaatctccatttccacagttaaggaacataaaaaagatggagacattaattcttaggaactgcaatctcacaggagacttacctgattatcttggaaagattacctccttcaaattcttagatcttagcttcaataaattaagtggagccatccctaacacttatattaatcttagagacggaggttacatatattttacaggaaacatgttaaacgggtcggttccagattggatgtctgatttatgctctatttcttgtgttatagctttcaatgctcttcatataaactgtggtggggatgaaatgtctatcaatgggacaatatatgaatctgataagtacgatagactggagagttggtacgaaagtcgaaatggatggttctcaaacaacgtaggagtcttcgtagacgataaacatgttcccgagagagtaaccatcgagtctaactcatccgagctcaatgtggttgattttggtctgtatacgcaagctcgcatatcagctatctcactcacttactatgcattgtgtttagaaaatggaaattacaacgttaatctccatttcgccgagattatgttcaatggtaacaacaattatcaaagcttgggtagacggtttttcgacatatacattcagaggaagctcgaggttaaagatttcaatatcgccaaggaggcaaaagatgttggaaacgttgttattaagacatttccggtcgagataaaagatggaaagttggagatacgattgtattgggccgggagaggaactacagtcattcccaaagaacgtgtttatggtcctctcatatcagctatatcagtggattcaagtgttaatccatctcctagaaatggtatgagtactggtactctccatacattggtagtgatcttatccattttcattgtgtttctcgtatttggaactctatggaaaaaaggttacttgagatcgaaaagccaaatggaaaaagatttcaaaagtttggaactcatgattgcttctttctcgttgaggcaaatcaaaatcgctacaaacaactttgattctgcaaataggattggagaaggcggctttggtcctgtatacaagggaaagttatttgatggaacaataatcgcagtgaaacaactttcgacaggatcaaaacaagggaaccgcgagttcttgaacgagattggcatgatttcagctctgcaccaccctaatctggttaaactatatggatgttgcgttgaaggaggccaacttttattagtctatgagtttgtagaaaacaacagtctcgctcgagcattgtttggtcctcaagaaactcagttgagattggactggcctacaagacggaagatctgtatcggagtggcgagagggctagcatatctacacgaagaatcgaggctaaagattgtacacagagacatcaaagccactaatgtgttgctagacaaacaactgaatccgaaaatatcagactttggtcttgccaagcttgatgaagaggacagcactcacattagcactcgaatcgctggaacatttggttacatggctccggagtacgccatgagaggccatttgacagataaagctgacgtttacagctttggtatagtagctctagagattgttcatggaagaagcaataaaatagaacgatccaaaaacaataccttctatcttattgactgggtggaggttttgagagagaagaataatctgttggaactggtggatccaagactaggatcagaatataacagagaagaagcaatgaccatgatccaaattgcgataatgtgtacaagctcagaaccttgtgagagaccgtcaatgtcagaagtggtgaagatgttagaaggtaagaagatggtggaggtggagaaacttgaagaagcttcagtccatagagaaacaaagagacttgaaaacatgaacacgatgaagaagtactacgaaatgatagggcaagagataagtacaagcatgagcatgatcatgagtgatcgtagtgaatcatcagcagatcattag

SEQ ID NO: 156 - protein, 854 aa, Arabidopsis thaliana (mouse-ear cress)
MGSLATCQHVHTHISIAAHTISIYIGLTLLMKCSWLLGNRLTGPIPKEFGNITTLTSLSNLIKKTYDFSVLEANQLSGELPLELGNLPNIQQMILSSNNFNGEIPSTFAKLTTLRDFRVSDNQLSGTIPDFIQKWTKLERLFIQASGLVGPIPIAIASLVELKDLRISDLNGPESPFPQLRNIKKMETLILRNCNLTGDLPDYLGKITSFKFLDLSFNKLSGAIPNTYINLRDGGYIYFTGNMLNGSVPDWMSDLCSISCVIAFNALHINCGGDEMSINGTIYESDKYDRLESWYESRNGWFSNNVGVFVDDKHVPERVTIESNSSELNVVDFGLYTQARISAISLTYYALCLENGNYNVNLHFAEIMFNGNNNYQSLGRRFFDIYIQRKLEVKDFNIAKEAKDVGNVVIKTFPVEIKDGKLEIRLYWAGRGTTVIPKERVYGPLISAISVDSSVNPSPRNGMSTGTLHTLVVILSIFIVFLVFGTLWKKGYLRSKSQMEKDFKSLELMIASFSLRQIKIATNNFDSANRIGEGGFGPVYKGKLFDGTIIAVKQLSTGSKQGNREFLNEIGMISALHHPNLVKLYGCCVEGGQLLLVYEFVENNSLARALFGPQETQLRLDWPTRRKICIGVARGLAYLHEESRLKIVHRDIKATNVLLDKQLNPKISDFGLAKLDEEDSTHISTRIAGTFGYMAPEYAMRGHLTDKADVYSFGIVALEIVHGRSNKIERSKNNTFYLIDWVEVLREKNNLLELVDPRLGSEYNREEAMTMIQIAIMCTSSEPCERPSMSEVVKMLEGKKMVEVEKLEEASVHRETKRLENMNTMKKYYEMIGQEISTSMSMIMSDRSESSADH

SEQ ID NO: 157 - DNA, 2550 bp, Oryza sativa
  CDS (1)..(2550)
atgaagatggagtctttcgcttggttgctgttgattcttgttctattctcgattttggaggatgtgcgaggatcaaaatccaagccgatcttgatcaactgcggctcagattccaccaccgatgttgatggcaggagatggattggggattcttctcccaagaacttcacactcagcttaccaggaacagttgccacagctccagattctgatgggaaagagacatatggagatttgtacaagaatgcccggatcttcaatgcatcctcaagctacaagttcatcgtcgccgctgccgggagctactttctccggctccatttcagtcagctacccactaatttcagcaccaaagaatcactctttgatgtttcagcaaatggcctgaagctggtctccaagttcaatgtccctgcagagatctacctgaggaactccaagatcaactccaccagccgcgccatcgtgaaggagtatcttctcaatgtcacctccagtaacttggagattgagttctcccccgatgccgaatcgttcgccttcatcaatgccatggagattgtgcctgtgtctggcaactcggtttttgattcggttaacaaggttggtggttatggcttgaagggtcctttcagtcttggggatagcgcggtcgagacgatgtataggatttgtgtggggtgtggcaagatagagagtaaggaggatcctggcttgtggaggaagtgggattcagatgaaaatttcatattctctatgagtgctgcgcgcgccatctccaattcttccaatataagctatgtgtcaagtgatgattctacctcggcgcctttgaggctctatgaaactgccagggtgacgacggagagttcagtcatggacaagaaattcaatgtgtcttggagctttaatgttgaccctgattttgattacttggtccggttgcatttctgtgagctggagtatgacaaggcggagcagcgcaagttcaagatttacataaacaacaagactgctgctgagaactatgacgtgtttgcgaaagccggggggaagaacaaggcttttcatgaggacttccttgatgccgcctcaccgcagatggacactctttgggttcagttgggatctgaatcctcagcaggtcctgcagctactgatgcacttctgaatggcatggagatctttaaggtcagtcggaatgggaatcttgctcatccaactgtgaggattggaggtttcaacagtgccatggggaaaccgaaacgtagccccaagtgggtactaattggtgcagctgctggtttggtgatttttgtgtcaattgttggtgttattttcgtatgtttctatctgcgatggaagaagaagacttcagctaacaaaaccaaggataatccaccaggttggaggccacttgtgctccatggtgctacaacacctgcagcaaattcccgctccccaactcttcgtgcagcaggtacgtttgggagcaacaggatgggaaggcagttcactgttgcagaaatcagagaagccaccatgaactttgatgattccttggtgatcggtgttggtggtttcggcaaggtctacaagggagagatggaagatggcaagctggtggcaatcaagagggggcatccagagtctcagcagggtgtgaaggagtttgaaactgagatcgagatcctctcaagactgcgacaccgacaccttgtgtccttgattggctactgtgatgagcaaaatgagatgatcttagtttatgagcacatggcaaatggtaccttgaggagccacctttatggaactgatcttcctgctcttacatggaagcagaggcttgaaatatgtatcggcgcagcccgggggcttcactaccttcacactggacttgacaggggtataatccacagggatgtcaagactactaatatcttgttggatgacaactttgttgcaaagatggcagattttggtatctcgaaagatggtccacctttagatcatactcatgttagtactgctgttaaggggagttttggttaccttgatccagaatattatcggaggcagcagttaacccaaagttcagatgtgtactcttttggcgttgtgctgtttgaagttctatgtgctcggccagtcataaacccggccttgccaagagatcagataaaccttgctgagtgggctctcaagtggcaaaagcagaagttacttgagaccataatcgaccctcggttagagggaaattacacactggagtccatcaggaaattcagtgagatagctgaaaaatgccttgcagatgaagggagaagccggccttcgattggtgaagtcctgtggcacctagagagtgctttgcagttgcatcaaggtcttctgcaaagtgcgaatactgatgatttatcacagcctgaactgaagctctctgatgcatcctgcaatttagggtgcatcgaagaagttgaggaatcctgccgtgcagggtcccaggatgtgaatgaggaatatgtggatgtcaaaattgaagttccatga

SEQ ID NO: 158 - protein, 849 aa, Oryza sativa
MKMESFAWLLLILVLFSILEDVRGSKSKPILINCGSDSTTDVDGRRWIGDSSPKNFTLSLPGTVATAPDSDGKETYGDLYKNARIFNASSSYKFIVAAAGSYFLRLHFSQLPTNFSTKESLFDVSANGLKLVSKFNVPAEIYLRNSKINSTSRAIVKEYLLNVTSSNLEIEFSPDAESFAFINAMEIVPVSGNSVFDSVNKVGGYGLKGPFSLGDSAVETMYRICVGCGKIESKEDPGLWRKWDSDENFIFSMSAARAISNSSNISYVSSDDSTSAPLRLYETARVTTESSVMDKKFNVSWSFNVDPDFDYLVRLHFCELEYDKAEQRKFKIYINNKTAAENYDVFAKAGGKNKAFHEDFLDAASPQMDTLWVQLGSESSAGPAATDALLNGMEIFKVSRNGNLAHPTVRIGGFNSAMGKPKRSPKWVLIGAAAGLVIFVSIVGVIFVCFYLRWKKKTSANKTKDNPPGWRPLVLHGATTPAANSRSPTLRAAGTFGSNRMGRQFTVAEIREATMNFDDSLVIGVGGFGKVYKGEMEDGKLVAIKRGHPESQQGVKEFETEIEILSRLRHRHLVSLIGYCDEQNEMILVYEHMANGTLRSHLYGTDLPALTWKQRLEICIGAARGLHYLHTGLDRGIIHRDVKTTNILLDDNFVAKMADFGISKDGPPLDHTHVSTAVKGSFGYLDPEYYRRQQLTQSSDVYSFGVVLFEVLCARPVINPALPRDQINLAEWALKWQKQKLLETIIDPRLEGNYTLESIRKFSEIAEKCLADEGRSRPSIGEVLWHLESALQLHQGLLQSANTDDLSQPELKLSDASCNLGCIEEVEESCRAGSQDVNEEYVDVKIEVP

SEQ ID NO: 159 - DNA, 3286 bp, Oryza sativa
  CDS (80)..(3151)
cactatatttcaaaacaaaccaaaccaaacctgctgcttttgctttggttaattagctgagagagaaattaagagagagatgagttgcagcagcagcagcgtccatggcttcttgtggctgatgctcgtttatgcgtcctgtgcagctgttcaagctcagcaagcagcgagaactgatccagcagaagtggctgcactgaacacgatcctggggagatggggcctgcgggcgtcgccggcgtggaacatcagcggcgagccctgcagcggcgtcgccatcgacgagaccggcgtcgacaacaaccccaacatcaacccggccatcaagtgcgactgctccttcaacgccggcaccgtctgccacatcatcagactgagagtgttctcgttgaacgttgttggtcaaatacctgaggagctgcagaatctctcttatctgaataacttggatcttcggcgaaattacttgacgggtcccctgccatcctttattggaaacttttctgccatgcagtacttggcggtgtccctcaatccgttatctggacctcttccgaaggagatcgggaatcttagaaatcttctatcattgggcattagttcaaacaattttactggtgaactccctgcagaactgggcaatttggaaaaactcgagcaaatgtatattattagttctggcttcagtggtcccttcccttcaacattctcaaagcttaagaatttgaagattctgtgggcatcagataatgatttaacaggaaaaatacctgattattttgggagctttccaaatttacaagatttaaggttccaaggaaattcttttcaaggtccaattccagcaagtctatcaaatctaaccagattaacaagtttgcggatcggtgatattctaaatgggagctcctcgctgtcgtttatctctaatctgacatctttgaatgtcttaatactgaggaactgcaagatatctgataatcttggaacagttaacttttctaagcttgcagggttaaccttactggacttgagctttaacaatatcacaggtcatgttcctcaatccatactgaatctggacaagcttagcttcttgtttcttgggaacaacagcctttctggaagcttgccatatgacaaaagcccttcactgaacaatttagatttttcatataaccatctctctggaagctttcctccatgggttactgggaacaatttgcaactgaatttggtggctaatgacttcattcttgatagcaccaacaatagcattttaccttcagggctaaactgtctccagcaagatactccttgtttccgtggttctccagaatattattcctttgcggtcgactgtggcagtaataaatctacaaggggatcagataatactttgtatgaaactgatgctcaaaacattggagccgcatcttattatgttagtgacaatgcgagatggggtgtaagcagtgtaggtaaattcaatgaggcttccaatggaagttatgcaatatatagcccccagcagtttcagagtgcacttaactcagaattattccaaactgcaagaatgtcaccatcatcacttagatactatggtattggacttgagaatgggaattacactgtctcacttgagttcgcagagtttgtttatccaaactcactaacttcaaatagcatcgggcggagagtttttgacatatatgttcagggtgagctgaaggaaaagaacttcaatataaggaagatggctggtggaaagtctcttattgctgtcaataagagatatactgcaactgtgtccaaaaacttccttgagatccatctgttctgggctgggaagggtacttgttgcattcctactcaaggacattatggacctacgatctcagcattaagcgtgaccccaaattttattcctactgtgcaaaatggtgttccaaaaaagaaaagtaaagcagggacaatttctggagtagtgatcggcgcttcattctttggattagcagtcctagttggattatttatgttgctaaagaagagaaggagaacgtcacaacggaaagaagaactctacaacatggttggaaggcgtaatgtcttcagcaatgcggagcttaagttagctacggagaattttggttctcaaaacattcttggagaaggaggatatggaccagtctataagggtatattaactgatggaagggtggtagctgtgaaacaactttctcaatcatcccagcaggggaaaagccagtttgtgacagaggttgcaacaatctcttctgtgcaacatcggaaccttgtgaaattatatggctgctgcattgacagtaatacaccattgttggtttatgagtacctcgaaaatggaagtctggatcaagcactcttcggggatggtaggttcaaccttggctggtcaacacgttttgaaatcattttaggcattgcaagagggctaagttatcttcatgaggaggccaatgtgcgcatcgtgcatcgggacatcaaggctagtaacatcctactcgaccctgatttaacacccaagatatctgattttgggcttgccaagctctatgatgagaagaagactcatgttaacacaaaagttgccggcacgtttggctacctggcacctgagtatgcaatgagaggccatttaactgaaaaggttgatgttttctcatttggtgtggtcgctctagagactgtcgctggtcgatcaaacaccgactactcccttgtggaagacaagaaatatctctttgaatgggcttgggggctctatgaacgagagcaagcgctcggaatcgtggacccaaggctcgaggaaatcaatgaagaggaggtcttgagagtcattcgtatgtcgttcctttgcacccaaggctcaccacaccaaagaccacctatgtcaagggtggtggcaatgctcaccggagacattccggtgagtgatgtggtggcgaagccgaactacatcattgagttgcagctcaggggaaggaatagcagccatgtcaccaccggctactccgggtctactgccgatgagctcagtgggcagagggagacatcccctctcacaccttccctagagattaacagagaaattatcgatgatggaagatgaatgcgaagttgcaaagtgatggtagtgatcttcgtttcaagagctaattttggacattattcgtgttcaaataaattgcatttttatgtgagttagagctaataaaattgaatgtgacatgtgctactattgtgc

SEQ ID NO: 160 - protein, 1023 aa, Oryza sativa
MSCSSSSVHGFLWLMLVYASCAAVQAQQAARTDPAEVAALNTILGRWGLRASPAWNISGEPCSGVAIDETGVDNNPNINPAIKCDCSFNAGTVCHIIRLRVFSLNVVGQIPEELQNLSYLNNLDLRRNYLTGPLPSFIGNFSAMQYLAVSLNPLSGPLPKEIGNLRNLLSLGISSNNFTGELPAELGNLEKLEQMYIISSGFSGPFPSTFSKLKNLKILWASDNDLTGKIPDYFGSFPNLQDLRFQGNSFQGPIPASLSNLTRLTSLRIGDILNGSSSLSFISNLTSLNVLILRNCKISDNLGTVNFSKLAGLTLLDLSFNNITGHVPQSILNLDKLSFLFLGNNSLSGSLPYDKSPSLNNLDFSYNHLSGSFPPWVTGNNLQLNLVANDFILDSTNNSILPSGLNCLQQDTPCFRGSPEYYSFAVDCGSNKSTRGSDNTLYETDAQNIGAASYYVSDNARWGVSSVGKFNEASNGSYAIYSPQQFQSALNSELFQTARMSPSSLRYYGIGLENGNYTVSLEFAEFVYPNSLTSNSIGRRVFDIYVQGELKEKNFNIRKMAGGKSLIAVNKRYTATVSKNFLEIHLFWAGKGTCCIPTQGHYGPTISALSVTPNFIPTVQNGVPKKKSKAGTISGVVIGASFFGLAVLVGLFMLLKKRRRTSQRKEELYNMVGRRNVFSNAELKLATENFGSQNILGEGGYGPVYKGILTDGRVVAVKQLSQSSQQGKSQFVTEVATISSVQHRNLVKLYGCCIDSNTPLLVYEYLENGSLDQALFGDGRFNLGWSTRFEIILGIARGLSYLHEEANVRIVHRDIKASNILLDPDLTPKISDFGLAKLYDEKKTHVNTKVAGTFGYLAPEYAMRGHLTEKVDVFSFGVVALETVAGRSNTDYSLVEDKKYLFEWAWGLYEREQALGIVDPRLEEINEEEVLRVIRMSFLCTQGSPHQRPPMSRVVAMLTGDIPVSDVVAKPNYIIELQLRGRNSSHVTTGYSGSTADELSGQRETSPLTPSLEINREIIDDGR

SEQ ID NO: 161 - DNA, 2616 bp, Arabidopsis thaliana (mouse-ear cress)
  CDS (1)..(2616)
atggagataagaaagaaaccaaacatacccatgtgtcttgtcttagattcttcttccaggcccttcatgactctcctcttcaccatcctcctcttcttaaccggcctagcttcagcggttggcgccgtcggtggtagcccaactgctggtttcaaaccggctgatgacattctcattgattgtggtagcaagtcatcaaccaaaacccctgaaggtagagtctttaagagtgactcagaaacggttcagtacatagaagccaaagacgatattcaggtctctgctccaccttcagataaactcccttctcctatttaccttaccgcgaaaatcttccgcgaagaagccatttacaagttccatttgacccgtcctggttggcattgggttcgtctccatttctttgcctttcccaatgacaagtttgatctccaacaagcaactttctctgttttaacagagaagtatgtcttgcttcataactttaaactaagtaacgacaacaatgatagccaagctactgttcagaaagagtacctcctcaacatgaccgatgcacaattcgccctaaggttcaagcctatgaaaggctctgcggctttcatcaacggtatagaacttgtgtcagctccagacgaacttatctctgatgcaggcacttctcttttccctgtcaacggtttttcgggtttgtctgattacgcataccagtccgtttacagggttaatgttggtggccccttgatcacgccacagaatgacacactaggaagaacttggacacctgacaaagaatacttaaaagatgagaatctagctaaggatgttaaaacaaaccctacagcgatcatctatcctcctggagttacaccgctgatagcgccacaaacggtttacgcaacaggagcagagatggctgattctcaaaccatagatcctaacttcaatgttacatggaatttcccatcaaacccatcatttcactacttcattcgtcttcatttctgtgacatcatcagcaagtctcttaatgacctctacttcaacgtttacatcaatggaaagaccgctatttccgggctagatttgtccactgtagctggagatctttctgctccttactacaaagacattgtggtgaactcgacacttatgacatctgagcttcaggtccagattggtcctatgggagaagacactgggaaaaagaacgcgatcttgaacggtgtcgaggtcttgaagatgagcaactctgtgaacagtcttgatggagaatttggagtggatggtcaaagagcgagtatggggaagcaggggatggttgcaaccgcgggttttgtgatgatgtttggagccttcgtaggtcttggagcaatggtttacaagtggaagaagagaccacaagattggcagaagagaaacagtttctcttcttggttacttccaatacacgctggtgacagtaccttcatgacaagcaaaacaggttctcacaaatccaacttgtacaattccgcgcttggcctcggacgctatttctccctctctgagcttcaagaagtcacaaagaacttcgatgcatcagagatcatcggtgttggtggatttggtaacgtttacattggtaccattgacgatggaactcaagttgctatcaaacgaggcaatccacagtcagagcaagggatcacagagtttcatacagagattcagatgctatctaagcttagacacagacacttagtctcattgattggatactgcgatgagaacgcagagatgatccttgtatacgaatacatgtccaatggtccttttagagatcatctttatgggaagaatctttctcctttgacttggaaacaaagactggagatctgcattggagctgctcgtggacttcactatttacacacaggaacagctcaaggcattatccatcgtgacgtcaaatccacaaatattcttcttgatgaagctttagttgcaaaagttgctgactttggtctctccaaagacgttgcctttggacaaaaccatgttagtacggctgtgaaaggtagttttgggtatttagacccggaatacttcaggagacagcaacttacagacaaatccgatgtttattcctttggtgttgttctactagaagctctatgtgcaagaccagccattaatcctcagcttccaagggaacaagttaacttagccgaatgggctatgctatggaaacaaaaaggtttactcgaaaagatcatcgaccctcatctcgttggtgctgtgaatcctgaatcaatgaaaaagtttgcagaagctgcagagaagtgtttagcagattatggtgttgatagaccaacaatgggagatgtattgtggaacttagaatatgctcttcagcttcaagaggctttttctcagggtaaagctgaggctgaggaggttgagactcccaagcctgtggctgtccctgctgctgcgccgacttcacctgctgccaccactgctgcagcaagtgaacgtccagtttctcagactgaagagaaggatgactcaacggtggaccaacactctggaaccaccatgtttactcagtttgctagccttaacggaagataa

SEQ ID NO: 162 - protein, 871 aa, Arabidopsis thaliana (mouse-ear cress)
MEIRKKPNIPMCLVLDSSSRPFMTLLFTILLFLTGLASAVGAVGGSPTAGFKPADDILIDCGSKSSTKTPEGRVFKSDSETVQYIEAKDDIQVSAPPSDKLPSPIYLTAKIFREEAIYKFHLTRPGWHWVRLHFFAFPNDKFDLQQATFSVLTEKYVLLHNFKLSNDNNDSQATVQKEYLLNMTDAQFALRFKPMKGSAAFINGIELVSAPDELISDAGTSLFPVNGFSGLSDYAYQSVYRVNVGGPLITPQNDTLGRTWTPDKEYLKDENLAKDVKTNPTAIIYPPGVTPLIAPQTVYATGAEMADSQTIDPNFNVTWNFPSNPSFHYFIRLHFCDIISKSLNDLYFNVYINGKTAISGLDLSTVAGDLSAPYYKDIVVNSTLMTSELQVQIGPMGEDTGKKNAILNGVEVLKMSNSVNSLDGEFGVDGQRASMGKQGMVATAGFVMMFGAFVGLGAMVYKWKKRPQDWQKRNSFSSWLLPIHAGDSTFMTSKTGSHKSNLYNSALGLGRYFSLSELQEVTKNFDASEIIGVGGFGNVYIGTIDDGTQVAIKRGNPQSEQGITEFHTEIQMLSKLRHRHLVSLIGYCDENAEMILVYEYMSNGPFRDHLYGKNLSPLTWKQRLEICIGAARGLHYLHTGTAQGIIHRDVKSTNILLDEALVAKVADFGLSKDVAFGQNHVSTAVKGSFGYLDPEYFRRQQLTDKSDVYSFGVVLLEALCARPAINPQLPREQVNLAEWAMLWKQKGLLEKIIDPHLVGAVNPESMKKFAEAAEKCLADYGVDRPTMGDVLWNLEYALQLQEAFSQGKAEAEEVETPKPVAVPAAAPTSPAATTAAASERPVSQTEEKDDSTVDQHSGTTMFTQFASLNGR

SEQ ID NO: 163 - DNA, 3093 bp, Oryza sativa
  CDS (1)..(3093)
atggggtggaggatggcggtgagtcggctcctccatggctgtgttcttgtgctgcttcttgcagcggcggttgttcaggctcagcgggcggcgacgaggactgatccgactgaagcggcggcgctgaacgcggtgttcgcgaagctagggcagcaggcgcagtcgtcatggaacctcagcggcgacccctgcaccggccgggcgacggacggctccgccatcgacgacaccagcttcaacccggccatcacctgcgactgcaccttccagaacagcaccatctgccgcatcaccaagctgaaaatacatgccgtggatgcgtctggcccgataccggaagagctgcggaacctcacgcgcttgaccgatctgaatttaggacaaaatttattatcagggcctttgccatcgttcattggggagctgactaatatgcagaaaatgacatttggcatcaattcattatctggacctattccaaaggagctcggtaatcttacgaatcttatatcactgggtttgggctcaaaccatttcaatggttcgcttcctacagaactagggaacctgatcaaacttcaggaactgtacattgacagtgctggcttaagtggtccgttaccatcatcattgtccaagcttacaagaatgcaaatattgtgggcatcagataacaattttactggacaaataccagattatattgggagctggaatttgacagacctgcggtttcaaggcaattcttttcaaggtccaattcccgctgctctttctaatcttgtccaattatcaagcttacgaatcggtgatattgaaaatggaagctcttcttcactggcattcatcagtaacatgacatcattgagcatcctgattttgaggaactgtaggatatctgataatcttgcatcattagacttttcaaagtttgcgagtttaagcttactggatttgagttttaacaatatcactggtgaagtaccagcaaccctgttgggtctgaattctctgaacttcttatttcttgggaataatagtctttcaggaagccttccaacctcaaaaggatcttcactttcaactttagatttttcttacaaccagctctcaggaaactttcctccttgggctagtgataaaaatttacaattgaatttggtggcaaacaattttgtgattgatagttccaataacagtatcttaccttcagggctggcatgccttcagagaaatacatccttctttcttggttctccacagtcttcctcctttgctgtgaactgtggtagcaatagattcatatcaggctcagataatttaaggtatgaaactgatgatgtcaatcttcaagcagcatcatataatgttacaggagcaccaacgtggggtgttagcaacgttggaaagttcatggacgcaccaaatgggaattacataatctacagctcccgccagtttcagcacaccctagattcagaactgttcctaacttcaaggatgtcaccatcatccttaagatactatggtattggacttgagaatggaaactatacagtcactcttcaatttgcagagtttggaatcgaagatacacagtcttggaagagcctagggagaagggtttttgatatatatgtgcagggtgaacgcaaggagaagaactttgacatcaggaagacagcaggcgataaatcttacactgttgttaagaagcaatacaaagttcctgtgaccaaaaacttccttgagattcatctcttctgggctggcaagggcacttgctgcattcctactcaaggatactatgggcccactatctcagctctgagtgtaatccctgcagatttcacccctacagtgggtaatacagcacataaaaacaagagtactagtaaaacaggtgtaattgttggagttgtagttggtgtgacggttttaggtttggtagcacttgttggaatctttatgtggagacagaaaaggagaaaattatcactggagcaacaagagctatacagtattgtcggaagacctaatgtattcagttatagtgaactaaggtctgcaactgaaaattttagttccagcaaccgccttggtgaaggaggatatgggacagtttataagggcaagttaactgatggaagggtagtggcagtgaagcagctatctcaaacatctcatcaagggaaaaaacaatttgcgacggagatagaaactatatcccgagtgcaacatcgtaatctcgtgaagttgtatggttgctgccttgaaggcaataatccactgctggtttatgagtacatggaaaacggaagccttgataaagcattgtttggaactgagaaattgaccatagattggccagcacgttttgagatatgcctaggcattgcaagaggtctggcttatcttcatgaagagtccagcatctgtgttgtgcacagggacatcaaggccagcaatgtcttaattgacgccaatctcaatcctaagatctctgattttgggctagccaaactttatgatgacaagaagacgcatgtcagcacgaaggttgctggcacattcggttatcttgcacctgagtacgccatgagaggccatatgaccgagaaagttgacgtctttgcatttggcgtggtcttattggagactttagccggacggccaaactatgatgatacgcttgaagaagacaaaatttatattttcgacatggcctgggagctgtacgagaacaacaaccctctgggcctcgtagacccaaagctcaaggaattcaaccgggaggaggtgctccgtgccatccgcgtcgccctcctctgcacccagtggtcgcctcaccagcgggcgccaatgtcgagggtcgtgtcgatgctcgccggcgatgtcgaggtgcccgatgtgctgacaaagccgagctacatcaccgagttggcagatcacgggtggcaacaccagcttcgccaacagcggagtcatcgggcagtcgagctcggcgccgggatcggcctcggagcagcaaggctcgtcattgttcttgaactccgtcatcccggaaggccggtgattttcgcgcgggtctga

SEQ ID NO: 164 - protein, 1030 aa, Oryza sativa
MGWRMAVSRLLHGCVLVLLLAAAVVQAQRAATRTDPTEAAALNAVFAKLGQQAQSSWNLSGDPCTGRATDGSAIDDTSFNPAITCDCTFQNSTICRITKLKIHAVDASGPIPEELRNLTRLTDLNLGQNLLSGPLPSFIGELTNMQKMTFGINSLSGPIPKELGNLTNLISLGLGSNHFNGSLPTELGNLIKLQELYIDSAGLSGPLPSSLSKLTRMQILWASDNNFTGQIPDYIGSWNLTDLRFQGNSFQGPIPAALSNLVQLSSLRIGDIENGSSSSLAFISNMTSLSILILRNCRISDNLASLDFSKFASLSLLDLSFNNITGEVPATLLGLNSLNFLFLGNNSLSGSLPTSKGSSLSTLDFSYNQLSGNFPPWASDKNLQLNLVANNFVIDSSNNSILPSGLACLQRNTSFFLGSPQSSSFAVNCGSNRFISGSDNLRYETDDVNLQAASYNVTGAPTWGVSNVGKFMDAPNGNYIIYSSRQFQHTLDSELFLTSRMSPSSLRYYGIGLENGNYTVTLQFAEFGIEDTQSWKSLGRRVFDIYVQGERKEKNFDIRKTAGDKSYTVVKKQYKVPVTKNFLEIHLFWAGKGTCCIPTQGYYGPTISALSVIPADFTPTVGNTAHKNKSTSKTGVIVGVVVGVTVLGLVALVGIFMWRQKRRKLSLEQQELYSIVGRPNVFSYSELRSATENFSSSNRLGEGGYGTVYKGKLTDGRVVAVKQLSQTSHQGKKQFATEIETISRVQHRNLVKLYGCCLEGNNPLLVYEYMENGSLDKALFGTEKLTIDWPARFEICLGIARGLAYLHEESSICVVHRDIKASNVLIDANLNPKISDFGLAKLYDDKKTHVSTKVAGTFGYLAPEYAMRGHMTEKVDVFAFGVVLLETLAGRPNYDDTLEEDKIYIFDMAWELYENNNPLGLVDPKLKEFNREEVLRAIRVALLCTQWSPHQRAPMSRVVSMLAGDVEVPDVLTKPSYITELADHGWQHQLRQQRSHRAVELGAGIGLGAARLVIVLELRHPGRPVIFARV

SEQ ID NO: 165 - DNA, 3078 bp, Oryza sativa
  CDS (1)..(3078)
atgagggtgatgagccatctcctcctccatggcggtgtgctcctgctgcttcttgcagcggcggctgttcaggctcagcgggtagcaaccaagactgatccgactgaagcggcggcgctgaacgcggtgttcgcgaagctcgggcagcaggcgtcgttgtcgacggcgacatggaacatcagcggcgacccctgcaccggcgccgccacggacggcacccctatcgacgacaaccccaacttcaacccggccatcaagtgcgactgcaccttccagaacaacaccgtctgccggatcaccaagctgaaaatatatgccttagatgtgcctggcacgataccacaagagctgcggaacctcacgcgcttgacccatctgaatttagggcaaaatacattaacagggcctttgccatcattcattggggagttgactaatatgcagaacatgacatttcgcatcaattcattatctggacctattccaaaggagctcggtaaccttacgaatcttgtatcactgggtttaggctcaaacaggtttaatggctcccttccttcagaactggggaacctggacaagcttcaggaattgtacattgacagtgctggcttaagtggtccactaccatcatcattttccaagcttacaagaatgcaaacattgtgggcatcagataatgattttactggacaaataccagattatatcgggaactggaatttgacagacctgcggtttcaaggcaattcttttcaaggtccaattccttctgctctttctaatcttgtccaactatcaagcttacgaatcggtgatattgaaaacggaagctcttcttcactggcattcatcggtaacatgacatcgttgagcatcctgattttgaggaactgtaagatatctgataatcttgcatcaatagacttttcgaagtttgcaagtttaaacttactggatttgagttttaacaatatcactggtcaagtaccaacagccctgttgggtctgaatttgctgaactccttatttcttgggaataatagtctttcaggaagccttccaagctcaaaaggaccttcactttcaactttagatttttcttacaaccagctctcaggaaattttcctccatgggctagtgggaaaaatttacaattgaatttggtggcaaacaatttcgtgattgatagctccaataacagtatcttaccttcagggcttgcatgccttcaaagaaatacgccatgttttcttggttctccacagtcttcctcctttgctgtggactgtggtagcaatagactcatatcagcctcagataatttgaggtatcaaactgatgatgccagccttggacctgcatcatattctgtcacaggagcaccaacctggggtgttagcaatgttggaaagtttgtggatgcaccaaatggaagttacataatctacagctcgcgccagtttcagaacaccctagattcagaactgttccagacttcaaggatgtcaccatcatctttaagatactatggtattggacttgagaatggaaactatacagtcactcttcaatttgctgagtttgggatcgaagacacgcagacttggaagagcctagggagaagggtttttgatatatatctccagggtgaacgtcaggagaagaactttgacatcaggaaggcagcaggcgataaatcttacactgttgttaagaagtcatataaagttcctgtgaccaaaaacttccttgagattcatctcttctgggctggcaagggcacttgctgcattcctggtcaaggctactatgggcccactatctcggctttgagtgtaacccctgcagatttcacccccacggtgggtatcgtggcagaacaaaacaagagtactagtaaaacaggtgttattgttggcgttgtggttggtgtggcagttttaggtttggtagcacttgttggaatttttatgtggagacagaaaaggagaaaactgacactggagcaacaagagctatacagtattgttggaagacctaatgtattcagttatagtgaactaaggtctgcaactgaaaattttagttccagcaaccgtcttggtgaaggaggatatggggcagtttataagggtaagttaaatgatggaagggtagtggcagtgaagcagctatctcaaacatctcatcaaggaaaaaagcaatttgcaacggaaatagaaactatatcccgagtgcaacaccgtaatcttgtgaagttatatggttgctgccttgaaggcaataatccactgctggtttatgagtacatggaaaatggaagccttgataaagcactctttggaattgagaaattgaacatagattggccagcacgttttgacatatgcttaggcattgcaagaggtctggcttatcttcatgaagagtccagcatccgtgtcgtgcacagggacatcaaggccagcaatgtcttacttgacgccaatctcaatcctaagatctcagattttgggctagccaaactttatgatgacaagaagacgcatgtcagcacgaaagttgctggtacattcggttatcttgcacctgagtatgccatgagaggtcatatgactgagaaagttgatgtctttgcatttggcgtggtcttattggagactttagctggacggccgaactacgatgatacacttgaagaagataagatttacattttcgaatgggcctgggagctgtacgagaacaacaaccctctgggcattgtagacccaaatctcagagaattcaacagggcggaggtgctccgggccatccacgtcgccctcctctgcacccagggctcacctcaccagcggccgcccatgtcgagggtcgtgtcaatgctcaccggcgacaccgaggtcaccgatgtgttgatgaagccgagctacatcaccgagtggcagatcaagggcggcaacaccagcttcgccaacagcgccgtccgcgggcagtcgagctcggcgccaggatcgacgtcgcagcaagcctcgtcggtgttcttgaactccatcatccaggaaggccggtga

SEQ ID NO: 166 - protein, 1025 aa, Oryza sativa
MRVMSHLLLHGGVLLLLLAAAAVQAQRVATKTDPTEAAALNAVFAKLGQQASLSTATWNISGDPCTGAATDGTPIDDNPNFNPAIKCDCTFQNNTVCRITKLKIYALDVPGTIPQELRNLTRLTHLNLGQNTLTGPLPSFIGELTNMQNMTFRINSLSGPIPKELGNLTNLVSLGLGSNRFNGSLPSELGNLDKLQELYIDSAGLSGPLPSSFSKLTRMQTLWASDNDFTGQIPDYIGNWNLTDLRFQGNSFQGPIPSALSNLVQLSSLRIGDIENGSSSSLAFIGNMTSLSILILRNCKISDNLASIDFSKFASLNLLDLSFNNITGQVPTALLGLNLLNSLFLGNNSLSGSLPSSKGPSLSTLDFSYNQLSGNFPPWASGKNLQLNLVANNFVIDSSNNSILPSGLACLQRNTPCFLGSPQSSSFAVDCGSNRLISASDNLRYQTDDASLGPASYSVTGAPTWGVSNVGKFVDAPNGSYIIYSSRQFQNTLDSELFQTSRMSPSSLRYYGIGLENGNYTVTLQFAEFGIEDTQTWKSLGRRVFDIYLQGERQEKNFDIRKAAGDKSYTVVKKSYKVPVTKNFLEIHLFWAGKGTCCIPGQGYYGPTISALSVTPADFTPTVGIVAEQNKSTSKTGVIVGVVVGVAVLGLVALVGIFMWRQKRRKLTLEQQELYSIVGRPNVFSYSELRSATENFSSSNRLGEGGYGAVYKGKLNDGRVVAVKQLSQTSHQGKKQFATEIETISRVQHRNLVKLYGCCLEGNNPLLVYEYMENGSLDKALFGIEKLNIDWPARFDICLGIARGLAYLHEESSIRVVHRDIKASNVLLDANLNPKISDFGLAKLYDDKKTHVSTKVAGTFGYLAPEYAMRGHMTEKVDVFAFGVVLLETLAGRPNYDDTLEEDKIYIFEWAWELYENNNPLGIVDPNLREFNRAEVLRAIHVALLCTQGSPHQRPPMSRVVSMLTGDTEVTDVLMKPSYITEWQIKGGNTSFANSAVRGQSSSAPGSTSQQASSVFLNSIIQEGR

SEQ ID NO: 167 - DNA, 2535 bp, Oryza sativa
  CDS (1)..(2535)
atgaggctacttgcgctggcagttgcaagcatcgtgcttgctaatttgcacctgttgggagttcatgggagggatttgcttctcagctgtggttcaaacgcgactgtggatgctggcggccggagatggatcggcgacatggcccccgggctgaattttaccttaagcagccctggaatagctgcgtcgcaggctgggagcagcaatggcaatgaaatcttcggactggtgtaccattccgcgcgtttctttagcacggcatcttggtataacttcagcgtgctgccggggaactactgcctcaggctgcatttcttcccttacacattcgggaatttcagtgggaatgattcattgtttgatgtcactgcaaatgatttcaagctggtctcgaaattcaacgtgtcagaggagattgtttggaggagcactgtgagcaattcagccatcaatgcagttgtcaaggagtattttcttttagttggttctcgtggtctgcaggttgagtttgatccaagccctgggtcatttgcctttgtgaatgcaattgaggtgatgctcactccagataacctgttcaatgacacagtaaacaaagttggcagcgctggaaatgggcagcttcctcttggtttaagcaacagaggcctagagacaatgtaccggttgaatgttggagggcatgcacttaattcttccagcgatcagtatctgcacagaccatggtacactgatgaagcattcatgttttctgcgaatgctgctcagattgtgtccaacacttcaagtgtaagttatctctcaaacaatgactcctcaatttctcccattgatgtatacgagactgcaagaatcatgagcaacaacatggttgtggacaagcggttcaatgtttcatggcgattctatgtccaccccaactttgattacttggtccgccttcatttctgtgagcttttctatgacaagcccaaccagagggtcttcaagatctacatcaacaacaagacagctgctgaggactatgatgtgtatgtcagggcagggggtattaataaggcatatcatgaagactattttgacaacttgccacagcaggtagactcactctggcttcagctaggccctgactccttgaccagtgcttcaggcaccgatccacttctgaatggtttggagatattcaagctcagcaggaatggcaacctcgcttatgttcttggccatattgacatgggtaaccaaaggggtatttccaaggatagaaataggaaaattttatgggaagaagtcggaattggctcagcttcttttgtgacactgacaagtgtggttctatttgcatggtgctatgtaagaaggaaacgaaaagctgatgagaaggaggcccctcccggttggcacccactggtcctccatgaggctatgaaaagcaccacagatgcccgtgcagccggtaaatcacccttgacacgtaattcatcttccattggtcatagaatgggcagaagattcagcatttcagagattagggctgctacaaagaactttgatgaggctttgcttattggtactggtggttttggcaaggtttacaagggtgaggtcgatgagggtactacagtggcaatcaagcgtgcaaatccattatgtggccagggcttgaaagaatttgaaacagaaattgagatgctctccaagcttaggcaccggcaccttgttgcaatgattggctactgtgaagagcagaaggaaatgattctagtctacgaatacatggccaaggggacattgcgaagccatctttatggaagtgacctcccacctctgacatggaagcaacgagttgatgcctgcattggtgcagctcgtgggcttcactacctccacactggagcagaccgaggtataatccatagggatgtgaagactacaaacatcttgttggatgagaattttgttgcaaagatagcagattttggtctgtctaaaactggcccaacactggaccagacccatgttagtacagcagtcaagggaagctttgggtaccttgatcctgagtacttccggaggcagcaactcacacaaaaatctgatgtgtattcttttggagtggtgctctttgaagtcgcttgtggcagaccagttatagaccccactctaccaaaggatcaaatcaacttggcagagtgggcaatgagatggcagcgccagcgttcgctggatgcaatagtggatccacggctggacggtgacttttcatctgaatccttgaagaagtttggtgaaattgcggagaagtgccttgctgatgatgggagaagcaggccatcgatgggtgaggtcttgtggcatctggaatatgtgctgcagctccatgaagcttacaagcgtaataatgtggactgtgaatcatttggaagcagtgaactgggatttgccgatatgtcctttagcctgcctcatatcagagagggagaagaggaacatcactcaaagccatctagtataagagaagatccagacacttga

SEQ ID NO: 168 - protein, 844 aa, Oryza sativa
MRLLALAVASIVLANLHLLGVHGRDLLLSCGSNATVDAGGRRWIGDMAPGLNFTLSSPGIAASQAGSSNGNEIFGLVYHSARFFSTASWYNFSVLPGNYCLRLHFFPYTFGNFSGNDSLFDVTANDFKLVSKFNVSEEIVWRSTVSNSAINAVVKEYFLLVGSRGLQVEFDPSPGSFAFVNAIEVMLTPDNLFNDTVNKVGSAGNGQLPLGLSNRGLETMYRLNVGGHALNSSSDQYLHRPWYTDEAFMFSANAAQIVSNTSSVSYLSNNDSSISPIDVYETARIMSNNMVVDKRFNVSWRFYVHPNFDYLVRLHFCELFYDKPNQRVFKIYINNKTAAEDYDVYVRAGGINKAYHEDYFDNLPQQVDSLWLQLGPDSLTSASGTDPLLNGLEIFKLSRNGNLAYVLGHIDMGNQRGISKDRNRKILWEEVGIGSASFVTLTSVVLFAWCYVRRKRKADEKEAPPGWHPLVLHEAMKSTTDARAAGKSPLTRNSSSIGHRMGRRFSISEIRAATKNFDEALLIGTGGFGKVYKGEVDEGTTVAIKRANPLCGQGLKEFETEIEMLSKLRHRHLVAMIGYCEEQKEMILVYEYMAKGTLRSHLYGSDLPPLTWKQRVDACIGAARGLHYLHTGADRGIIHRDVKTTNILLDENFVAKIADFGLSKTGPTLDQTHVSTAVKGSFGYLDPEYFRRQQLTQKSDVYSFGVVLFEVACGRPVIDPTLPKDQINLAEWAMRWQRQRSLDAIVDPRLDGDFSSESLKKFGEIAEKCLADDGRSRPSMGEVLWHLEYVLQLHEAYKRNNVDCESFGSSELGFADMSFSLPHIREGEEEHHSKPSSIREDPDT

SEQ ID NO: 169 - DNA, 2538 bp, Oryza sativa
  CDS (1)..(2538)
atgcgccgccgcgggaggatgatcccgccggcgctgctgctggccgccgcggtggcggcggcgctcgcgacggccgtgtcggggcaggggcggccggtcaccgagagcggcgcgcagacggcgccgacgccgtcgacgttcacgcccaaggacaacttcctcatcgactgcggcagcacgagccccgtcaccaccggcggcaaggtgtacaagacggacgcgcagtcgaacagccttctctccgccaaggacgccatcaaggtcgccaccaccgacgccgacgtgccctcgccgctctacctcaccgcccggatcttccgcgacgaggccgtctacagcttcccgctcaccgtcccgggctggcacttcgtccgcctctacctcttcccgctcaagaactccgacttcgacctcaccaccgccaccttcaccgtctccaccgacaccaacgtcctcctccacagcttcaccgccgagaacaagccggtcatgaaggagttcctcgtgaacgccaccgagaaccacctcgccgtcaagttctacccgctcaagggctccgccgcgttcatcaacgccatcgaggtcgtgaacgcccccgacgagctcatcacagacatggccatggggatcgctcccgtcggagagatgaccgggctcgccgaggcggcgtaccaggtggtgtaccggatcaacgtcggcggcccggccatcgcgcccgacaaggatacgctggggcggcagtgggacgtggacgcgccgtacgtgcagtcgaaggaggcggtgaaggacgtgtcggtgccggtggggaacatcaagttccccgacgggacgtcgaagctggtggcgccggcgcaggtgtacgcgagctgcgcgaagatggcggacgccggcgtggggagcccgagcttcaacatgtcgtggaagatggaggtggacccggcgttcggctacctggtccggctcttcttcgcggacatcgtgagcaagagcatgaacgacctctacttcaacgtgttcgtcaacgggcgcaaggccatctccgggctggacctgtcgacggtgaccggcgagctgtcggcggcgtactacaaggacatcgtcgtcaactcgtcgatcgcgacggacaagctgagcatccaggtggggccgatgggggaggacacggggcgcgtggacgcgctgctcagcggcgtggaggtgctcaagatgagcaactcggtggggagcctcgacggcgagttcggcgtggacgggaagaaggccgacgacggcagcggcagccgcaaggccgtggcggcggtggggttcgcgatgatgttcggcgcgttcgccggcctgggagccatggccgtcaagtggtacaagcggccccaggactgggagcgccggaacagcttctcgtcgtggctgctccccatccacaccggccaatccttcaccaccagcaagggcgggtccagcaagagcggctacaccttctcctccaccctcggcctcggccgcttcttctccttcgccgagatccaggccgcgaccaagaacttcgaggagagcgccatcatcggcgtcggcggcttcggcaacgtctacatcggcgagatcgacgacggcaccaaggtcgccgtgaagcgcgggaacccgcagtcggagcaagggatcaacgagttcaacaccgagatccagatgctgtccaagctccgccaccgccacctcgtctccctcatcggctactgcgacgagaacgccgagatgatcctcgtctacgagtacatgcacaatggccccttccgcgaccacatctacggcaaggacctgccggcgttgacgtggaagcagcggctggagatctgcatcggcgccgcccgcggcctccactacctgcacaccggcacggcgcaggggatcatccaccgcgacgtcaagaccaccaacatcctcctcgacgacaacttcgtcgcaaaggtatccgactttgggctgtccaaggacggccccgggatgaaccagctgcacgtcagcaccgccgtcaagggcagcttcggctacctcgacccggagtacttccggtgccagcagctgacggacaagtccgacgtctactccttcggcgtcgtgctcctcgagacgctgtgcgcgcggccgcccatcgacccgcagctgccgcgcgagcaggtcagcctcgccgagtgggggatgcagtggaagcggaagggcctcatcgagaagatcatggaccccaagctcgccgggacggtgaaccaggagtcgctcaacaagttcgccgaggccgccgagaagtgcctcgccgagttcggcagcgacaggatctccatgggcgacgtgctctggaacctcgagtacgcgctccagctgcaggacgccaacccgcccgagggggccgacaagccagccgaccacgacggcgccggcgcggccccggcgacctcctccggctccggcgtctccaccgtgcccgacgtgtccaccaccgccgccggcgagatgttcgcgcagctcgccgacatgaaggggaggtga

SEQ ID NO: 170 - protein, 845 aa, Oryza sativa
MRRRGRMIPPALLLAAAVAAALATAVSGQGRPVTESGAQTAPTPSTFTPKDNFLIDCGSTSPVTTGGKVYKTDAQSNSLLSAKDAIKVATTDADVPSPLYLTARIFRDEAVYSFPLTVPGWHFVRLYLFPLKNSDFDLTTATFTVSTDTNVLLHSFTAENKPVMKEFLVNATENHLAVKFYPLKGSAAFINAIEVVNAPDELITDMAMGIAPVGEMTGLAEAAYQVVYRINVGGPAIAPDKDTLGRQWDVDAPYVQSKEAVKDVSVPVGNIKFPDGTSKLVAPAQVYASCAKMADAGVGSPSFNMSWKMEVDPAFGYLVRLFFADIVSKSMNDLYFNVFVNGRKAISGLDLSTVTGELSAAYYKDIVVNSSIATDKLSIQVGPMGEDTGRVDALLSGVEVLKMSNSVGSLDGEFGVDGKKADDGSGSRKAVAAVGFAMMFGAFAGLGAMAVKWYKRPQDWERRNSFSSWLLPIHTGQSFTTSKGGSSKSGYTFSSTLGLGRFFSFAEIQAATKNFEESAIIGVGGFGNVYIGEIDDGTKVAVKRGNPQSEQGINEFNTEIQMLSKLRHRHLVSLIGYCDENAEMILVYEYMHNGPFRDHIYGKDLPALTWKQRLEICIGAARGLHYLHTGTAQGIIHRDVKTTNILLDDNFVAKVSDFGLSKDGPGMNQLHVSTAVKGSFGYLDPEYFRCQQLTDKSDVYSFGVVLLETLCARPPIDPQLPREQVSLAEWGMQWKRKGLIEKIMDPKLAGTVNQESLNKFAEAAEKCLAEFGSDRISMGDVLWNLEYALQLQDANPPEGADKPADHDGAGAAPATSSGSGVSTVPDVSTTAAGEMFAQLADMKGR

SEQ ID NO: 171 - DNA, 2532 bp, Oryza sativa
  CDS (1)..(2532)
atggcaaccgttcttgagatgctcgtgcagctcgccgtcgttgtcacggtgctatgcgccgccgtgcgagcgtacaccccggcggacagctacctcttcctctgcggcacgtccgggaacgccaccgtcgatggccggacgttcgtcggggacgctggtctgccggcctcggtgctgatggcgccccagagcaccgaggccaacatgccggcgaaccaggtcactggcgccggcgacgactcgccggcgctgtaccagtcagcgcgcgtgttcacggcgccggccaactacgcgttctccgctaagcctggccgccacttcgtccgcctccgcttcttccccttccggtaccagtcttacgacctcgccgcggacgcggcgttcaatgtgtccgtgcagggcgtggtgttcgtcgacgggtacacgcccaagaacggcacggccgtggtcagggagttctccgtgaacatcaccggtagggcgctggtgatcgcgttcacgccgacgggcaagaaggtggcgttcgtcaacgccatcgaggtggtgtcccatcccgacgagctcatcggcgacaccgcgccgatggtgaatccgcggaaccagtcccagtacaccgggttgacggcgaaggcgctggagacggtgcaccggatcaacatgggagagcccaaggtcacgccgaacaacgacacgctgtggaggacatggctgccggactggaccttcctgcacgagagcagcttcgcggcgcacaatcaagtgtctccggcgatgatcaagtaccaaagtggctacgcgacctcgctgacggcgccctccgcggtgtacaccaccgtgacggagttgaacacgacggcggcgatggtcggcaacacgcaggcgcagctcaacctgacgtggaagttcaacgcaccggccgtctcggactacctcctccggctccacttgtgcgacatcgtcagcaaggcgacgctcggtgtggtgttcaatgtctacgtcggccagtggcgggttctccaagactacgagtcttccggcgacacgttcagccttcttgccacgccgctctataaggacttcgtccttgccgccagtgatgcggcgaagggtacaatcacggtgagcatcgggtcatcgacggcaaccaacgcgttgcccggcggcttcctgaacggcctcgagatcatgagaattgtcgggagcaccggctccatcgacggcgccacgtcgccgcgcggctcaaagatcaagaccgggatcatcgccggatcggccgtgggcggggcggtgttggcgattgctctcgggtgcgtcgccgtcaggatgctgcggaggaagaagaagccggtgaagcagccgtcgaacacctgggtgccgttctcggcgagcgcgctgggcgcccgctctcgcaccagcttcggcaggagcagcatcgtcaacgtcgtcacgctggggcagaacggcgccggcgccggcgccgggtaccgcttcccgttcgcggcgctgcaggaggcgacgggcgggttcgaggaggagatggtgatcggcgtgggcgggttcgggaaggtgtacaggggcacgctccgggacggcacgcaggtggccgtgaagcgcgggaaccggctgtcgcagcaggggctcaacgagttccgcacggagatcgagctgctgtcccagctgcgccaccgccacctcgtctcgctcatcggctactgcgacgagcgcggcgagatgatcctggtgtacgagtacatggcgaagggcacgctccggagccacctgtacggctccgacctgccgccgctgccgtggaagcagaggctggaggcgtgcatcggggccgcgagggggctgcactacctgcacaccggctcggccaaggcgatcatccaccgggacgtcaagtcggccaacatcctcctcgacgacggcttcatggccaaggtcgccgacttcgggctgtccaagaccgggccggagctggacaagacgcacgtcagcaccgccgtcaagggcagcttcgggtacctcgacccggagtacttccggcggcagatgctgacggagaagtccgacgtctactccttcggcgtcgtcctgctcgaggtgctctgcgcccgcgccgtcatcgacccgacgctgccccgggagatggtgaacctggcggagtgggcgacgcggcggctcagggacggcgagctcgaccggatcgtggaccagaaaattgccgggacgatacggccggactcgctcaagaagttcgccgacaccgccgagaagtgcctcgcggagtacggcgtggagcggccgagcatgggggacgtgctctggtgcctcgagtacgcgctgcagctgcaggtggcgtcgccggacagctctgtcacgacgcttcagcgcagctcgtcgatctcaagcgtcgtgacagacgccaccgtgagtgcgaacctgggggacctcgacggcatgtccatgaagagagtattctcaaagatgctcaagagcgaggaagagggcaggagaaagatgcactaa

SEQ ID NO: 172 - protein, 843 aa, Oryza sativa
MATVLEMLVQLAVVVTVLCAAVRAYTPADSYLFLCGTSGNATVDGRTFVGDAGLPASVLMAPQSTEANMPANQVTGAGDDSPALYQSARVFTAPANYAFSAKPGRHFVRLRFFPFRYQSYDLAADAAFNVSVQGVVFVDGYTPKNGTAVVREFSVNITGRALVIAFTPTGKKVAFVNAIEVVSHPDELIGDTAPMVNPRNQSQYTGLTAKALETVHRINMGEPKVTPNNDTLWRTWLPDWTFLHESSFAAHNQVSPAMIKYQSGYATSLTAPSAVYTTVTELNTTAAMVGNTQAQLNLTWKFNAPAVSDYLLRLHLCDIVSKATLGVVFNVYVGQWRVLQDYESSGDTFSLLATPLYKDFVLAASDAAKGTITVSIGSSTATNALPGGFLNGLEIMRIVGSTGSIDGATSPRGSKIKTGIIAGSAVGGAVLAIALGCVAVRMLRRKKKPVKQPSNTWVPFSASALGARSRTSFGRSSIVNVVTLGQNGAGAGAGYRFPFAALQEATGGFEEEMVIGVGGFGKVYRGTLRDGTQVAVKRGNRLSQQGLNEFRTEIELLSQLRHRHLVSLIGYCDERGEMILVYEYMAKGTLRSHLYGSDLPPLPWKQRLEACIGAARGLHYLHTGSAKAIIHRDVKSANILLDDGFMAKVADFGLSKTGPELDKTHVSTAVKGSFGYLDPEYFRRQMLTEKSDVYSFGVVLLEVLCARAVIDPTLPREMVNLAEWATRRLRDGELDRIVDQKIAGTIRPDSLKKFADTAEKCLAEYGVERPSMGDVLWCLEYALQLQVASPDSSVTTLQRSSSISSVVTDATVSANLGDLDGMSMKRVFSKMLKSEEEGRRKMH

SEQ ID NO: 173 - DNA, 3269 bp, Oryza sativa
  CDS (1)..(2775)
atggctgcgatcgttttgctgctcttccttgtcgtgggcttgatgccggtttccaatgggcagacgacgcccttctccccgcgattctccgtctacctcgcgtgcggcgccggcgggaacgtcgtcgtgacgtcggactcgccgcagcggactttcgtcccggacgacggcgagctgtccgggaagtccgcgaggttcagcaaccccgacgcgagcccgccgtcccctctctacgccgcggcgcgcgcggggacgagcggcttctcgtaccggctcagctacgctgccgacgcggcgcccgacggcaacaccacgctcgtcctccgcctccacttcttccccttcgcgtcgcagtccggcgacctcctctcggcgcggttcagcgtctcggccatggggaggtacgtcctcctgcctccttccttctcgccgccgcgcgccggcgtggtgagggagttcctcctcccgtccgatggctccggcgagttcgacgtcgccttcacgcccgaatcaggggggctcgccttcgtcaacgccatcgagctgttccccgcgccgcaggagcttctgtggaagttccccctgacggcggtcaacaccgacgtctcgccgtcgcatcaggcgctggagacgctgtaccggctcaacgtcggcgggccaacggtgacgccgacgggcgacaccatgtggcgaacatggctccccgacgactcctacctctccccggcgacggtctcggcggtggccagcatccagggccagatcatcttcgaccgggcgcagggctacacgcagatggtcgcgccggacgccgtgtacaagtcgcagcgcacgacgaactcgaccacgtcgaacgtgacatggacgttcgccgtcgacggcaacagcagctacgtcgtccgcctccacttctgcgccttcgaggagctcagctccgtcatcggagaaggcgtcgatttcaatgtttatctgatgcaagccatgggtacccgggaattgaaggccaaggactacgcgacgctgagcagtccgacccaagctttctacatggactatgtcgccgtggtcccgaccgccggcgagaacctcacggtgagcatcggcagggcggcgagcagcgacagcaagaaggcgatactgaacgggctggagatcatgaagctcagagccgttgatatgactccggcgagctcgtccggcaagacgagcaaggtcgtcgtcgtagccgtgaccgcggcggtgctcggcgcggcggttctagcaggtgtggcattgtgcgtactgcttgtgcggcggagacagcggcgggcgacgctgcctgtgccggaggaggaggagaaggagagcgtggggacgccgtggtcgccgttcacgccggacggcgagggctcgttcggcagcgccgtggtcacgccgcggaggatgaacatgaagctccacatcccgctcgccgagatcatggtggcgacgggggacttcgacgacgcaaacatcctcggcgtcggcgggttcgggaacgtgtaccgcggcgtgctccgcgacggcacccgcgtcgccgtgaagcgcgccaagcgcgcgtccaggcaggggttcccggagttccagactgagatcctggtgctctccagcatccgccaccgccacctcgtctcgctcatcggctactgcaacgagcggtcggagatgatcctcgtgtacgagctcatggcgcacggcaccctgaggagccacctgtacggctccgacgccgcggcggcgacgccgccgccgctgtcgtggaagcagcggctggagatctgcatcggcgcggcgaaggggctccactacctgcacaccggccactccgataacatcatccaccgcgacgtcaagtcgacgaacatcctcctcggcgacggcttcgtggcgaaggtggccgacttcgggctgtcccgcgtcgggccatcgacggggcagacgcacgtgagcacggcggtgaagggcagcttcggctacctcgacccggagtacttcaagacgcggcagctcaccgaccgctccgacgtctactccttcggcgtcgtcctcttcgaggtgctgtgcgcgcggccggcgatcgaccagagcctcccgcccgacgagatcaacctcgcggagtgggcgatgcagtggagccggaggggccggttcgacaagatcgtcgacccggccgtcgccggcgacgccagcacgaactcgctccggaagttcgcggagaccgccgggaggtgcctcgcggactacggcgagcagcggccgtccatgggcgacgtggtgtggaacctcgagtactgcctccagctgcaggagagccagccgagcaccgagacggcgctggacttggacgacagcggcgcgcacctgccacgggacatcgtcgtggcgaggcgagtggcgccgctcgcgcccgatgcttcggcggacgccgccggagacgacatgagctggtcggagacggcgagcttcacggcgacgggcaacgtgttctcgcagattatgtcccgcgatgatagatctcgggctccccgtacctcgtacctcctagggctaatggatcagaagggtttcgacggcgataggtcggagagtaggctctatgtggggaatttggattttagggtatcagagtctgacattatcaagatgttttctccatttgggaagattatagctgaggatttcttgtggcacacacgcggcccgaagcgaggcgagccccgtggctatgccttcgttcaatacaccaccaaagagtgagcatgcaggaagcacagttggcgaaggaaaagatgaacggcaggttggtctgtggacgccctgtggtggttcacctggctagtgagaagtgtttcgtggactccggaaattcccacagagcaatgaaggacaagaaactggcaggtggttcaggaagcaaatcggtacagactgaccgtgccgcgaagatagctgccataaagcacaagttgaaatccttagaggatgagggatgcagtacaaaaagaccaagatttaagtcagatgacttgccgggcagcggcaagcaatctgataaggagtgctgagatgagattgttcaggatcttcagatactcttcttgttctggtgattttgctgaaggtgctcctgactgtaaaattttagttctgttatgttagacaagtcacaggtgtaacactttatagtttatcacatttgtacaccaggctgtatcatctacctgcgattaacacgaacgatttgttggtgg

SEQ ID NO: 174 - protein, 924 aa, Oryza sativa
MAAIVLLLFLVVGLMPVSNGQTTPFSPRFSVYLACGAGGNVVVTSDSPQRTFVPDDGELSGKSARFSNPDASPPSPLYAAARAGTSGFSYRLSYAADAAPDGNTTLVLRLHFFPFASQSGDLLSARFSVSAMGRYVLLPPSFSPPRAGVVREFLLPSDGSGEFDVAFTPESGGLAFVNAIELFPAPQELLWKFPLTAVNTDVSPSHQALETLYRLNVGGPTVTPTGDTMWRTWLPDDSYLSPATVSAVASIQGQIIFDRAQGYTQMVAPDAVYKSQRTTNSTTSNVTWTFAVDGNSSYVVRLHFCAFEELSSVIGEGVDFNVYLMQAMGTRELKAKDYATLSSPTQAFYMDYVAVVPTAGENLTVSIGRAASSDSKKAILNGLEIMKLRAVDMTPASSSGKTSKVVVVAVTAAVLGAAVLAGVALCVLLVRRRQRRATLPVPEEEEKESVGTPWSPFTPDGEGSFGSAVVTPRRMNMKLHIPLAEIMVATGDFDDANILGVGGFGNVYRGVLRDGTRVAVKRAKRASRQGFPEFQTEILVLSSIRHRHLVSLIGYCNERSEMILVYELMAHGTLRSHLYGSDAAAATPPPLSWKQRLEICIGAAKGLHYLHTGHSDNIIHRDVKSTNILLGDGFVAKVADFGLSRVGPSTGQTHVSTAVKGSFGYLDPEYFKTRQLTDRSDVYSFGVVLFEVLCARPAIDQSLPPDEINLAEWAMQWSRRGRFDKIVDPAVAGDASTNSLRKFAETAGRCLADYGEQRPSMGDVVWNLEYCLQLQESQPSTETALDLDDSGAHLPRDIVVARRVAPLAPDASADAAGDDMSWSETASFTATGNVFSQIMSRDDRSRAPRTSYLLGLMDQKGFDGDRSESRLYVGNLDFRVSESDIIKMFSPFGKIIAEDFLWHTRGPKRGEPRGYAFVQYTTKE

SEQ ID NO: 175 - DNA, 2312 bp, Capsicum annuum
  CDS (88)..(2034)
ggcacgagtgacaattctactgctttggaaaatgtttaccgccttaatgtgggaggcaatgtaatctcaccatcaggtgatactggtatgtttaggtcatggggtgatgactcccagcatatttttggagcagccagtggagttacagatactgccgatgatgaaaatgtcacagtaagctatcctgaaggaatgccgtcctacattgccccacttgatgtttataagacagctaggtcaatgggtccaactgctcaagttaacctgcaatacaatttgagttgggtattctctgttgacccgggattctcttatcttgttaggctccatttctgtgagatcactagaaatatctcaaaagtcaaccagagggtgtttgtcatcttcatgaataatcagactgcggaacctgcagcagatgtcattgcttgggctggaagcaatggagttcctttccacaaggattatgtggtctctgttccttctggggcttcacagcaggatctttggcttgcactccatccaaacgttgcttcaaaatcaaattggtatgatgcaattttgaatggaatagaaatttttaaagtaagtgacaccaatggaaaccttgctgggcctaatcctgttccagttgctgaaccagatcatattgaccctctgccatccaaaaaaggtcaatcaaaaaataacacatcagctattggcggaggcattggaggtggaattgctgccgcaattcttattggtttaattgtatgccttgtcacgcgccttcggaaacgtgggaaggtccaaagtccaagcgatggaccatcaggctggctcccactttctttgtatggaaattcacatacttctggttccgctaagaccaacactactggcagttatgcttcgtccctcccatcaaacctttgtcgtcacttttcatttgctgagatcaaggcagccaccaataacttcgatgaagcactgcttcttggggtgggtggctttggcaaagtataccagggagaaattgatggcggcacaaaagttgctatcaaacgtggtaatcctctctctgagcaaggtgttcatgaattccaaactgaaattgaaatgctctcaaaacttcgccatcgccatcttgtttctttgattggttattgtgaagagaactgtgaaatgatccttgtatatgactacatggctcatggtacccttcgtgagcatctttataaaacccagaagcctcctttaccttggaagcagaggcttgagatttgcattggtgctgctcgtgggttgcactatcttcatactggtgcgaagcataccattatccaccgtgatgtaaagaccactaatatcctgttagatgagaagtgggtggcaaaggtttcggatttcgggttgtctaaaacaggccctacattggatcatacccatgtcagtaccgtggtgaagggcagttttggatatctggatccagaatacttcagaaggcagcaactcacagacaaatctgatgtctactcatttggtgtagtgctgtttgagattttgtgtgctcggccagcgctgaacccaactcttccaaaggagcaggtgagcttggcagagtgggctttccattgctacaagaagggaacttttgaccagataatcgacccatatctgaacgggaagcttgcaccagaatgcttgaagaaatttaccgagacagcagtgaagtgcgtctctgatgttggtgcagacaggccctcgatgggagatgtgctgtggaaccttgaatttgctctgcaacttcaggagagtgtagaggagtgttgcaagggttttggaaaaatggacattgaagaaggctttgatgtcacgtgcaaaggaaagaaggatttaaatgcattcccgggttatgatgaaagcatgactgactcaagaagcagtgggatatctatgagcattggcggccatagccttgccagtgaaaactcagacgggctaacacctagtgctgttttctctcaaatcatgaatccaaaaggacgttaaaatctcagagcttcaaagaaaatacacattgccaccagcttattaaggctatgtgctatcggcctctttaacagcagcagtcgctttgtcctttccttttcttttttttcccttccttgtactgccttattctttttactcactttttattttgtgattgatatgttttatttaaactcctttgtaagttgtatctaccaatactaaaagtgtgaaataaaaaaaaaaaaaaaaaaaaaaaaaaaaaaaaaaaaaaaaaaaaaaaaaaaaaaaaaaaa

SEQ ID NO: 176 - protein, 648 aa, Capsicum annuum
MFRSWGDDSQHIFGAASGVTDTADDENVTVSYPEGMPSYIAPLDVYKTARSMGPTAQVNLQYNLSWVFSVDPGFSYLVRLHFCEITRNISKVNQRVFVIFMNNQTAEPAADVIAWAGSNGVPFHKDYVVSVPSGASQQDLWLALHPNVASKSNWYDAILNGIEIFKVSDTNGNLAGPNPVPVAEPDHIDPLPSKKGQSKNNTSAIGGGIGGGIAAAILIGLIVCLVTRLRKRGKVQSPSDGPSGWLPLSLYGNSHTSGSAKTNTTGSYASSLPSNLCRHFSFAEIKAATNNFDEALLLGVGGFGKVYQGEIDGGTKVAIKRGNPLSEQGVHEFQTEIEMLSKLRHRHLVSLIGYCEENCEMILVYDYMAHGTLREHLYKTQKPPLPWKQRLEICIGAARGLHYLHTGAKHTIIHRDVKTTNILLDEKWVAKVSDFGLSKTGPTLDHTHVSTVVKGSFGYLDPEYFRRQQLTDKSDVYSFGVVLFEILCARPALNPTLPKEQVSLAEWAFHCYKKGTFDQIIDPYLNGKLAPECLKKFTETAVKCVSDVGADRPSMGDVLWNLEFALQLQESVEECCKGFGKMDIEEGFDVTCKGKKDLNAFPGYDESMTDSRSSGISMSIGGHSLASENSDGLTPSAVFSQIMNPKGR

SEQ ID NO: 177 - DNA, 2685 bp, Oryza sativa
  CDS (1)..(2685)
atgatcaaactccggtcagctctaggcgttcttgagatcttgtcagttctttgcatcagccttgttgctgcatacactccagtagacaactacctcatcagctgcggctcatcggtcgacacgccggttggccagcggctgttcgtcgccgacgactcgggcacggtcgtcctgacatctccggcgagtgacgcggtgaaagcctcgcccagcgcggtgtccgggttgcgcgacgacgccgccatgtaccagagcgccagggtgttcaaggcgccgtcgtcctactcgttccggatcagggaccccggccgccacttcgtccgcctccacttcttccccttcgtgtacctcggctacgacctcgccacggcgagcttcaaggtgtcgacgcaggacgccgtcctgctcgacggcttcgcgccggcggcggcggcgaggggcaacgcgtcgacgacgacgacgacggcgacggcggcggcggtgtgcgaggagttcctgctggacgtggcgcgcgacacgctcgtcgtcacgttcgtgccgctcgccggcaggctcgcgttcgtcaacgccatcgaggtcgtctcggtccccgacgacctcatcggcgctgctgactcgtcgctgtcgacgtccgactccactggccagcagctcaaccctgccgtgatgccgctgcaaacggtctatcgggtcaatgtgggcggccaagcggtggcgcccgacagcgacacgctctggcgagaatggactagtgaccagcaattattggttggacccgcaatgactaaaggagtttcttacaatcgaacaccgaactacctgcccgggcaagcgacggcgaacgacgcaccggccatcgtctacgccaccggcagggagcttatcatcatgacgaactcgacggacgacggcatgaaacaaatggcgtggcagttcgacgtcggcaggtcggcgagctacctgatcaggttccacttctgtgacatcgtgagcagcgtgcctggccgcctccacatgaacgcctatgtcgacagctccaacgcgattcaagatctcgacctctccgccattggcaatggcacgctggcgttcccgtattacagagacttcgtgctggctgctagcactccatccggcaagctcgccgtctacgttgggtcgacgtcgcagaagatcacgacacctgccgccattctcaatggcctagagatcatgaggatactcacgaccgccggcaacgtcgccgtcgtcgagccaacgatgccgccgggaacgaagaagaagaacaatttggccgtcgttcttggctcagtctgtggagctttcggtttcgtttccgtcgccgctgctcttgtcattgttcttaggaggaaagaggagaaggaggagctgcggacgccgacgacgagccagccgtcgacggcatggatgccgctcctcggccggatcagcttccgcagcgcgccgccgagcgccgtcgggtcacggtcgcccagcttcaccattgacaccaacgccaacactccaggaggaggcgccactcccggcatggccgcggcggcctcgtcttccccgagctaccgcttcccgttcgccgcgctgcaggacgcgacgggcaacttcgacgagggcctcgtcatcggcgagggcgggttcgggaaggtgtacgccgccgtgctccaggacggcaccaaggtcgccgtgaagcgcgcgaacccggagtcgcggcagggcgcgcgggagttccgcacggagatcgagatgctctccggcctgcgccaccgtcacctcgtctccctcatcggctactgcgacgagcaggatgagatgatcctgctctacgagtacatggagcacggctcgctgcggagccgcctgtacggcggcggcgcggcgacggcgacggcgacggcgctcagctgggcgcagcggctggaggcatgcgccggcgcggcgagggggctcctctacctgcacacggccaccgccaagccggtgattcaccgcgacgtcaagtcgtcgaacatcttgctcgacgacggcctcacggcgaaggtcgccgacttcggcctctccaaggccgggccggacatggacgagacgcacgtcagcacggcggtgaaggggagcttcggctacgtggacccggagtacgtgaggacgaggaagctcaccgccaagtccgacgtctactcgttcggcgtcgtgctcctcgaggcgctgtgcgcgcgccccgtcgtcgacccgaggttgcccaagccgatggtgaacctcgtcgagtgggggttgcactggcagcggagggacgagctggagaagatcgtcgaccggcggatcgccgggacggtgaggcccgccgcgctgaggaagtacggcgagacggtggccaggtgcctcgccgaccgcggcgccgaccggccggcgatggaggacgtcgtgtggagcctgcagttcgtggcgcggctgcaggaggtggacggcctcgacgcctccgacgtgagcagcctcaacatggttcatcagctgatgccgccgacgagcttgcacgctcgtcagagaagcgccggcgaaagcgagaccggcaggacggacgccgacgaggacagcagtgtggtagatgatgattacaccgatgcttccatgagaggaatcttctggcaaatggtcaatgtgcgcgggagatga

SEQ ID NO: 178 - protein, 894 aa, Oryza sativa
MIKLRSALGVLEILSVLCISLVAAYTPVDNYLISCGSSVDTPVGQRLFVADDSGTVVLTSPASDAVKASPSAVSGLRDDAAMYQSARVFKAPSSYSFRIRDPGRHFVRLHFFPFVYLGYDLATASFKVSTQDAVLLDGFAPAAAARGNASTTTTTATAAAVCEEFLLDVARDTLVVTFVPLAGRLAFVNAIEVVSVPDDLIGAADSSLSTSDSTGQQLNPAVMPLQTVYRVNVGGQAVAPDSDTLWREWTSDQQLLVGPAMTKGVSYNRTPNYLPGQATANDAPAIVYATGRELIIMTNSTDDGMKQMAWQFDVGRSASYLIRFHFCDIVSSVPGRLHMNAYVDSSNAIQDLDLSAIGNGTLAFPYYRDFVLAASTPSGKLAVYVGSTSQKITTPAAILNGLEIMRILTTAGNVAVVEPTMPPGTKKKNNLAVVLGSVCGAFGFVSVAAALVIVLRRKEEKEELRTPTTSQPSTAWMPLLGRISFRSAPPSAVGSRSPSFTIDTNANTPGGGATPGMAAAASSSPSYRFPFAALQDATGNFDEGLVIGEGGFGKVYAAVLQDGTKVAVKRANPESRQGAREFRTEIEMLSGLRHRHLVSLIGYCDEQDEMILLYEYMEHGSLRSRLYGGGAATATATALSWAQRLEACAGAARGLLYLHTATAKPVIHRDVKSSNILLDDGLTAKVADFGLSKAGPDMDETHVSTAVKGSFGYVDPEYVRTRKLTAKSDVYSFGVVLLEALCARPVVDPRLPKPMVNLVEWGLHWQRRDELEKIVDRRIAGTVRPAALRKYGETVARCLADRGADRPAMEDVVWSLQFVARLQEVDGLDASDVSSLNMVHQLMPPTSLHARQRSAGESETGRTDADEDSSVVDDDYTDASMRGIFWQMVNVRGR

SEQ ID NO: 179 - DNA, 2691 bp, Oryza sativa
  CDS (1)..(2691)
atgggaagctccagattcgtgctcttgctcctcctcctcctcgccgtggcggcttgcgtcgcgcgggggcaaggcggcggaaactcgagcagcgcggcggcgccggcgccggctgcgggggcggggccgttcgtgccgcgggacgacatcctgctcgactgcggcgcgacggggaaggggaacgacacggacgggcgggtgtggagcggggacgccgggtccaagtacgcgccggcgagcctcggctcggcgtccgccgcggggcaggacccctcggtgccgcaggtgccctacctcaccgcgagggtctccgcggcgcccttcacctactccttcccgctcggcgccggccgcaagttcctcaggctccacttctacccggccaactactccagccgcgacgccgccgacgcgcgcttctccgtctccgtccccgccgccaacgtcacgctcctctccaacttcagcgcctaccagaccgccaccgccctcaacttcgcctacatcgtccgcgagttctccgtcaacgtcacgaccccgacgatggagctcaccttcacgccggagaagggccaccccaacgcctacgcgttcgtcaacggcatcgaggttgtctcctcccccgatctcttcgacatctccaccccgaatctggtcaccggggatggcaacaatcagccattcccgatcgacgctggcactgctctgcagacaatgtaccgacttaatgtcggcggccaggcgatctccccctccaaggacacgggcggttaccgttcgtgggacgatgactcgccatacgtttttggtgcggcgttcggggtgtcctacccaaaagatgacaatgtcaccattgcctaccctagcaatgtgccggagtatgtggcgccggtggatgtctatgctacggcaaggtcgatggggccggacaagaacgtgaacttggcatacaacctcacttggataatgcaggtggatgctgggttcacataccttgtgaggcttcatttctgtgagatacaatatccaatcactatgatcaatcagcgggtgttcaacatttacatcaacaaccagactgcttttcagggcgccgatgtgattgcatggactaataacaatgggatcggcagtccagtgtatcaagactttgtagtgacaacagttggttcaggggctatggatttgtgggtagctctctatccagatgtccaggctaaaccacagtactatgatgctatcctcaatggactggaggtgttcaagttgccgcttagtaatgggagccttgctgggctcaaccctgttccaactgttgagccatcgttggatggtggagcagtgaagaagtcaagtgttgggcctattgttggtggagtgattggaggtctggtggttcttgcacttggatattgctgctttatgatctgcaagcgtcggagcagagtggggaaggacacaggcatgagtgatgggcattctggatggttgccactttcactctatggcaactcacactcatctggctcagccaaatcacatactactgggagctacgcttcatcgctgccatccaacctgtgccgccatttctcatttgcggagatcaaggctgcaacaaacaacttcgatgaatccctcctccttggtgtgggtggtttcggtaaagtgtatcgtggggagattgatggtggagtgaccaaggtggctatcaagcgtgggaatccactgtctgagcagggtgtgcatgagttccaaaccgagattgagatgctgtcgaagctccgccaccgtcatcttgtgtcactgattggttactgtgaggagaagaatgagatgatcctggtctatgactacatggctcatggaactcttcgtgagcacctgtacaagaccaagaatgcaccacttacatggaggcagcgcttggagatctgcattggtgctgcccgtgggcttcactaccttcacactggtgcgaagcacacaatcatccaccgtgatgtgaagacaacaaatatcctcctggatgagaagtgggtcgcgaaggtttcagattttggtctgtcaaagactgggccatcgatggatcacacacatgtgagcacagttgtcaagggaagttttggctaccttgaccctgaatacttccgcaggcagcagctcactgagaaatctgatgtctactcctttggtgttgtgctatttgaggtcctctgtgctcgccctgccttgaaccccactcttgctaaggaagaagttagcttggcagagtgggccctgcactgccagaagaagggtattcttgatcagattgttgatccccacctgaagggaaagatcgctccacagtgcttcaagaagtttgccgagactgctgagaaatgtgtttcagatgaaggcatcgatcgtccttcaatgggagatgtgctgtggaacttggaatttgcccttcaaatgcaggaaagtgcagaggatagtggaagcattggttgtgggatgtcagatgagggcactccccttgtgatgcctggaaagaaggatcccaatgatccatcgatcgagtcaagcaccactacaaccacaaccacgtccataagcatgggcgaccaaagtgttgctagcatagactccgacgggcttactcctagcgctgtcttctcacagatcatgaaccccaagggacggtga

SEQ ID NO: 180 - protein, 896 aa, Oryza sativa
MGSSRFVLLLLLLLAVAACVARGQGGGNSSSAAAPAPAAGAGPFVPRDDILLDCGATGKGNDTDGRVWSGDAGSKYAPASLGSASAAGQDPSVPQVPYLTARVSAAPFTYSFPLGAGRKFLRLHFYPANYSSRDAADARFSVSVPAANVTLLSNFSAYQTATALNFAYIVREFSVNVTTPTMELTFTPEKGHPNAYAFVNGIEVVSSPDLFDISTPNLVTGDGNNQPFPIDAGTALQTMYRLNVGGQAISPSKDTGGYRSWDDDSPYVFGAAFGVSYPKDDNVTIAYPSNVPEYVAPVDVYATARSMGPDKNVNLAYNLTWIMQVDAGFTYLVRLHFCEIQYPITMINQRVFNIYINNQTAFQGADVIAWTNNNGIGSPVYQDFVVTTVGSGAMDLWVALYPDVQAKPQYYDAILNGLEVFKLPLSNGSLAGLNPVPTVEPSLDGGAVKKSSVGPIVGGVIGGLVVLALGYCCFMICKRRSRVGKDTGMSDGHSGWLPLSLYGNSHSSGSAKSHTTGSYASSLPSNLCRHFSFAEIKAATNNFDESLLLGVGGFGKVYRGEIDGGVTKVAIKRGNPLSEQGVHEFQTEIEMLSKLRHRHLVSLIGYCEEKNEMILVYDYMAHGTLREHLYKTKNAPLTWRQRLEICIGAARGLHYLHTGAKHTIIHRDVKTTNILLDEKWVAKVSDFGLSKTGPSMDHTHVSTVVKGSFGYLDPEYFRRQQLTEKSDVYSFGVVLFEVLCARPALNPTLAKEEVSLAEWALHCQKKGILDQIVDPHLKGKIAPQCFKKFAETAEKCVSDEGIDRPSMGDVLWNLEFALQMQESAEDSGSIGCGMSDEGTPLVMPGKKDPNDPSIESSTTTTTTTSISMGDQSVASIDSDGLTPSAVFSQIMNPKGR

SEQ ID NO: 181 - DNA, 2532 bp, Oryza sativa
  CDS (1)..(2532)
atggcaagaagcatgcttgggtggaagagagtaccattgttctccatcctcctcatactttccataaccaatatagccaccacttatgccattgcatcacaagcagataggttcgtacctcgtgacaactaccttctcagctgcggggcgcctgctgctgtgcagcttgatgatggcaggacgttccgttctgatcccgactcggcgtcttttctctccaccccggtggacatcaagattactgctaaaaactccctggcttcaggtgcaccatcatcccaactctaccttacatcaagagttttctctgacatctcgacatatagcttcttcatctcccagcctggtcaccattggattcgtctccattttttacctatccctgatgaccattacaacctcactacagctacattctctgtctccactgatgacatggttcttcttcatgacttctcctttatagccactcctcctaacccagtccttagggagtatattgttgcaacacagggagacaccttgaaaatcatttttacccctaaaaaggactcaatagcattcatcaatgccattgaggttgtttcagcccctccaagccttattccaaataccaccaccggtatggctcctcagggccaacttgacatctccaacaatgcgttgcaggttgtctaccggctgaacatgggaggaccactggttacagccttcaatgacacactaggtagaatctggctgccagatgcaccatttctgaaacttcaggcagcagcaaatgcagcctgggttcctcctagaaccataaagtacccagatgacaagaccaacacgcccctcattgctcctgcaaacatctactcaaccgcacaacagatggcctcaacaaacacgtcggatgcaagattcaacataacatgggaaatggtgactgagccaggattcagctactttgtccgcctacatttctgtgacattgtcagcaaggcactcaacagcctctacttcaatgtatacataaatggcatgatgggtgtccttaacctcgacttgtcgagcctgacagtggggcttgcagtaccctactacagagacttcatcattgactcctccagtatcatcaactccaccctcatagtgcaaattggccctggcacaactgacaccagcaatcccaatgctattcttaatggccttgagatcatgaagataagcaaccaagaaaacagcttagatgggctcttttcaccaaaaagaagttcacagcttggcaagaagacaatgactggcatagggcttgcaatggcagtaatggctgccgctctagctgtagtcatgtgctgcaggcgacgccatagacctggatggcagaagacaaatagcttccagtcttggttccttccactcaactccacacaatccagcttcatgagcacctgcagcaggctgagctccagaaatcgttttggctctacaaggaccaaaagtgggttttcgagtatctttgcatctagtgcatatggactggggcgctatttcacctttgtggaaattcagaaagccacaaaaaactttgaagagaaggctgttattggagttggtggctttggaaaagtttatcttggtgttcttgaggatgggacaaagctggctatcaaacgaggaaatccatcttctgatcaaggtatgaatgagttcctgactgaaattcaaatgttatcaaagcttcgccatcgtcacttagtttcacttattggttgctgtgatgagaacaatgagatgatcctggtttatgagttcatgtcaaatggtccgctcagggatcatttgtatggtggcacagacatcaagcctctctcttggaagcaacggctggaaattagcattggggcagcaaagggcctgcattatcttcatacaggtgcagctcagggcataattcaccgtgatgtcaagaccaccaatatactgcttgatgaaaattttgtagccaaagttgcagattttggcttatcaaaagctgctccatcccttgagcaaactcatgtcagcacagctgtcaaaggaagttttggatatcttgatccagagtacttcagacgtcaacagctgacagagaagtctgacgtatactctttcggagtggtactctttgaagtattgtgtgcaaggccagccatcaatccaacacttccaagagaccaggtgaaccttgccgaatgggcccgtacatggcaccgcaagggagagctgaataaaataattgatccccacatttcagggcaaatccgtcctgattcacttgaaatatttgctgaggccgctgagaaatgtcttgctgactacggtgtcgatcgcccgtcaatgggtgatgtgttatggaaactcgaatttgccttgcaacttcaagaaaagggtgacattgttgatggaaccagcaatcaattcccaatgaagagcttagaagtaacaagtggtgatagcatggagaaatctggcaatgtagttccatcttatgtccaaggaagatga

SEQ ID NO: 182 - protein, 843 aa, Oryza sativa
MARSMLGWKRVPLFSILLILSITNIATTYAIASQADRFVPRDNYLLSCGAPAAVQLDDGRTFRSDPDSASFLSTPVDIKITAKNSLASGAPSSQLYLTSRVFSDISTYSFFISQPGHHWIRLHFLPIPDDHYNLTTATFSVSTDDMVLLHDFSFIATPPNPVLREYIVATQGDTLKIIFTPKKDSIAFINAIEVVSAPPSLIPNTTTGMAPQGQLDISNNALQVVYRLNMGGPLVTAFNDTLGRIWLPDAPFLKLQAAANAAWVPPRTIKYPDDKTNTPLIAPANIYSTAQQMASTNTSDARFNITWEMVTEPGFSYFVRLHFCDIVSKALNSLYFNVYINGMMGVLNLDLSSLTVGLAVPYYRDFIIDSSSIINSTLIVQIGPGTTDTSNPNAILNGLEIMKISNQENSLDGLFSPKRSSQLGKKTMTGIGLAMAVMAAALAVVMCCRRRHRPGWQKTNSFQSWFLPLNSTQSSFMSTCSRLSSRNRFGSTRTKSGFSSIFASSAYGLGRYFTFVEIQKATKNFEEKAVIGVGGFGKVYLGVLEDGTKLAIKRGNPSSDQGMNEFLTEIQMLSKLRHRHLVSLIGCCDENNEMILVYEFMSNGPLRDHLYGGTDIKPLSWKQRLEISIGAAKGLHYLHTGAAQGIIHRDVKTTNILLDENFVAKVADFGLSKAAPSLEQTHVSTAVKGSFGYLDPEYFRRQQLTEKSDVYSFGVVLFEVLCARPAINPTLPRDQVNLAEWARTWHRKGELNKIIDPHISGQIRPDSLEIFAEAAEKCLADYGVDRPSMGDVLWKLEFALQLQEKGDIVDGTSNQFPMKSLEVTSGDSMEKSGNVVPSYVQGR

SEQ ID NO: 183 - DNA, 2622 bp, Arabidopsis thaliana
  CDS (1)..(2622)
atgatccgtcacgctttgttaatattctctattctcgtttccacccccatagtaggagaaggagcaacgtcgacgtatgaacccaccgatgtctttctcttcaactgcggcgacacttcaaacaacgtcgacgttagtggccgaaactggacggcggaaaatcagaaaattctatcgtcaaatttagtcaacgcttcgttcactgcacaagcgtcataccaagaatcaggagtttctcagattccgtacatgacagctcgaatattccgatctgagttcacctacagttttccagtcactcccggttcaaattttctccggttatacttttacccgacccgatacggttcccaattcaacgccgtcaaatccttcttctccgtcaaagtcaacggcttcactctcttgaacaacttcagcgctgacttaacggtaaaagcatctaaaccgcaaacggagtttataatcaaagagtttattattccggtttaccaaacgttgaatctcactttcacgccgtctttagattccttagctttcgttaacggaatcgagattgtctccatacctaaccggttttactcaaagggaggatttgacgacgttataactaacgttggtagttccgttgactttcacatagaaaattcaacggcttttgagacagtttaccggttaaacgtagggggaaaaacggttggagattcgggaatgttccgacgatgggtctctgatgatgagatcatactcagtgaaagttcaggaatctctccgatcgtaccagatataaagattaactacacggagaaaactccgtcgtacgttgcgccggatgacgtgtacgccacgtctcgctcaatgggaaacgcggatcaccctgagcaaaacctaaattttaacctgacttggttattcaccgttgatgctgggtttagctaccttgtgaggcttcatttctgtgagactttgtcagaagtgaacaaagagggtcaacgcgtcttctctatctttattgaaaatcaaacggctacgcttgagatggacgtgtttcggatgagtggtggttcttggattccgatgtatctggattatactgtgattgcgggttcgggaagtggtcggagacatgatctaaggcttgatttgcatcctttggtgagcattaatccgaaatattatgatgctattctgaatggtgtggagattctcaagatgaatgatcccgatggtaatcttgcaggacctaatccagatcctctagtatcaccagacttaataccaaaccgtgcaacgccgcggattcgaaaaaataagtcacatattttgccgatcacacttgcagtggttggttctttagttgtgctagcaatgtttgttgttggtgttcttgttatcatgaagaagaagaagaagagcaagccatctacaaactcgtcatggtgtcctcttccgcacgggacagattctacgaatacaaaaccagcgaaatctctgcccgcggatctctgtcgtcgattctccattttcgaaatcaaatccgccacaaatgatttcgaggacaagctaatcatcggagtaggcgggtttggttctgtctacaaaggacaaatagacggtggagccacacttgttgcggttaaacggctggaaattacatcgaaccaaggtgctaaagagttcgaaacagagctcgagatgctctcaaagcttcgacatgtacatctcgtctctctaatcggctactgcgacgaggacaacgagatggtactagtctatgagtatatgccacatggtacacttaaagatcatcttttcaggagggacaaaacctctgatcctccattgtcatggaaacgaaggctagagatttgcattggagcagctcgtggattacagtatcttcatactggagccaagtacacgatcatacatagagacatcaaaaccacaaacatacttctcgatgagaacttcgtcactaaagtatctgactttggtttatcaagagttggtcctactagtgcttctcaaacgcatgtctccaccgtcgttaaaggaacgtttggttacttggaccccgagtactatcgccgtcaagtcttgaccgaaaaatctgacgtgtactcctttggagttgttctgttggaggttttgtgttgtagaccgattagaatgcaaagtgttccaccggaacaagcagatttgatccgatgggtgaagtcaaattacagaagaggaaccgttgatcagatcattgactcagatttatcggctgatatcacttcgacatcgttggaaaagttttgtgagatagccgttagatgcgttcaggaccgtggtatggaacggccaccgatgaacgacgttgtttgggcgcttgagtttgctcttcagcttcacgagactgctaagaagaagaatgacaacgtggagtctctggatctaatgccaagtggtgaggttggtacgaccacggacggagaagatgacttgtttagtaggactacaggacacgtggggaaatcgaccacgaccgatgactctgttctagttgttggtgatgagaggagtggttcgagttggggagtattttcggagatcaatgaacctaaagcacggtag

SEQ ID NO: 184 - protein, 873 aa, Arabidopsis thaliana
MIRHALLIFSILVSTPIVGEGATSTYEPTDVFLFNCGDTSNNVDVSGRNWTAENQKILSSNLVNASFTAQASYQESGVSQIPYMTARIFRSEFTYSFPVTPGSNFLRLYFYPTRYGSQFNAVKSFFSVKVNGFTLLNNFSADLTVKASKPQTEFIIKEFIIPVYQTLNLTFTPSLDSLAFVNGIEIVSIPNRFYSKGGFDDVITNVGSSVDFHIENSTAFETVYRLNVGGKTVGDSGMFRRWVSDDEIILSESSGISPIVPDIKINYTEKTPSYVAPDDVYATSRSMGNADHPEQNLNFNLTWLFTVDAGFSYLVRLHFCETLSEVNKEGQRVFSIFIENQTATLEMDVFRMSGGSWIPMYLDYTVIAGSGSGRRHDLRLDLHPLVSINPKYYDAILNGVEILKMNDPDGNLAGPNPDPLVSPDLIPNRATPRIRKNKSHILPITLAVVGSLVVLAMFVVGVLVIMKKKKKSKPSTNSSWCPLPHGTDSTNTKPAKSLPADLCRRFSIFEIKSATNDFEDKLIIGVGGFGSVYKGQIDGGATLVAVKRLEITSNQGAKEFETELEMLSKLRHVHLVSLIGYCDEDNEMVLVYEYMPHGTLKDHLFRRDKTSDPPLSWKRRLEICIGAARGLQYLHTGAKYTIIHRDIKTTNILLDENFVTKVSDFGLSRVGPTSASQTHVSTVVKGTFGYLDPEYYRRQVLTEKSDVYSFGVVLLEVLCCRPIRMQSVPPEQADLIRWVKSNYRRGTVDQIIDSDLSADITSTSLEKFCEIAVRCVQDRGMERPPMNDVVWALEFALQLHETAKKKNDNVESLDLMPSGEVGTTTDGEDDLFSRTTGHVGKSTTTDDSVLVVGDERSGSSWGVFSEINEPKAR

SEQ ID NO: 185 - DNA, 2785 bp, Arabidopsis thaliana
  CDS (11)..(2653)
atcaattccaatgatctgtcacgttttagtaattttcactattctcgtttccgccgtcgtcgacgcaacggcgtcgtatgagcccactgatgtctttctcatcaattgcggcgatacctccaacaacatggactacagtggccggaactggacgacggagaatccgaaatttatgtcatcgaatgcagttgacgacgcgtcgttcacttcatctgcgtcataccaagaatcagggattcctcaagtgccgtacttgaaagctaggattttccgatatgatttcacttacagttttccagtctctcccggctggaaattcctccggttatacttttatccgacccgttacggatccgatttcgacgccgttaaatccttcttctccgtcaacgtcaaccgtttcactctcttgcataacttcagtgtaaaagcttccataccggagtcaagttctctaatcaaagagtttatcgttccggttaaccaaactcttgatctcacgttcacgccctctccgaattcattagctttcgttaacggaatcgagattatctccatgcctgaccggttttactcaaagggaggatttgacgacgttgtaagaaacgttggtagggacgttgacttcgagatagacaactccacggctttcgagaccgtttatcgggtaaacgtaggtggaaaagtggtgggcgacgtcggagattcgggaatgttccggcgttggctttccgatgaaggtttcttactcggtattaattcgggagccattccgaatataacaggtgtaaagatcaactacacggataaaactcccgcgtacgttgcgccggaagatgtatacacgacgtgtcgcctgatggggaacaaagacagtcctgagctaaacctgaatttcaacctgacgtggctctttgaagtcgatgccgggtttgcctatatagtgaggcttcatttctgtgagacgcaaccggaagtcaacaaaacgggtgaccgcgtcttctccatcttcttcggatatcaactggccatgcgtgaaatggacgtgtttcggctgagtggtggttttcggctaccgatgtatctagatttcaaggtacttgtcgacgccgacggaactagccagagacctagtcttcgagttgacttgacaccttacaaagaggactatccaacctattacgacgctattttgagtggtgtagagattctcaagctgagtaattctgatggtaatcttgcggggcttaatccaattcctcaactaagtccaccaccacaatctataacgccactaaaaggaaaaggcaagtcatcacatgttttgccaataataattgcagtggttggttctgcagttgcgctagcgttttttgttcttgttgttgtcctcgttgttatgaagagaaagaagaagagcaacgagtctagtgtagataccacgaacaagccttctacgaactcgtcatggggtcctcttctgcacgggacaggctctacaaatacaaaatctgcctcatctcttccatcagatctctgccgtcgattctccatctacgaaatcaaatccgccacaaatgatttcgaggaaaaactaatcataggagtaggcgggtttggttctgtctacaaaggacgaatagacggtggagccacacttgttgcggttaaacggctggaaattacatcgaaccaaggtgctaaagagttcgatacagagctcgagatgctttcaaagcttcgacatgtacacctcgtctctctaatcggatattgcgatgacgacaacgagatggtacttgtctatgagtatatgccacatggtacacttaaagatcatcttttcaggagagacaaggcctctgatcctccattgtcatggaaacgaaggctagagatttgcattggagcagctcgtggattacagtatcttcatactggagccaagtacacgatcatacatagagacatcaaaaccacaaacatacttctcgatgagaacttcgtcgctaaagtatctgactttggtttatcaagagttggtcctactagtgcttctcaaacgcatgtctccaccgtcgttaaaggaacgtttggttacttggatcccgagtactatcgccgtcaaatcttgaccgaaaaatccgacgtgtactcttttggagttgttctgttggaggttttgtgctgtagaccgatcagaatgcaaagtgttccaccggaacaagcagatttgatccgatgggtgaagtcaaatttcaataaaagaaccgttgatcagatcattgactcagatttaaccgctgatatcacttcgacctcgatggagaagttttgtgagatagccattagatgtgttcaagaccgtggtatggaacggccaccgatgaacgacgttgtttgggcgcttgagtttgctcttcagcttcacgagactgctaagaagaagaatgacaacgtggagtctctggatctaatgccaagtggtgaagttggtacgaccacggacggagaagatgacttgtttagtaggactacaggacacgttgggaaatcgaccacgaccgatgactctgttctagttgttggtgatgagaggagtggttcgagttggggagtattttcggagatcaatgaacctaaagcacggtagatttgatggcttggtaaacaagtatcacattctggttagggttgatatatatttgtgtatgtataattgttgaataaacacattattgtatttaaattacattttgatgattatttagcagcttaaatttag

SEQ ID NO: 186 - protein, 880 aa, Arabidopsis thaliana
MICHVLVIFTILVSAVVDATASYEPTDVFLINCGDTSNNMDYSGRNWTTENPKFMSSNAVDDASFTSSASYQESGIPQVPYLKARIFRYDFTYSFPVSPGWKFLRLYFYPTRYGSDFDAVKSFFSVNVNRFTLLHNFSVKASIPESSSLIKEFIVPVNQTLDLTFTPSPNSLAFVNGIEIISMPDRFYSKGGFDDVVRNVGRDVDFEIDNSTAFETVYRVNVGGKVVGDVGDSGMFRRWLSDEGFLLGINSGAIPNITGVKINYTDKTPAYVAPEDVYTTCRLMGNKDSPELNLNFNLTWLFEVDAGFAYIVRLHFCETQPEVNKTGDRVFSIFFGYQLAMREMDVFRLSGGFRLPMYLDFKVLVDADGTSQRPSLRVDLTPYKEDYPTYYDAILSGVEILKLSNSDGNLAGLNPIPQLSPPPQSITPLKGKGKSSHVLPIIIAVVGSAVALAFFVLVVVLVVMKRKKKSNESSVDTTNKPSTNSSWGPLLHGTGSTNTKSASSLPSDLCRRFSIYEIKSATNDFEEKLIIGVGGFGSVYKGRIDGGATLVAVKRLEITSNQGAKEFDTELEMLSKLRHVHLVSLIGYCDDDNEMVLVYEYMPHGTLKDHLFRRDKASDPPLSWKRRLEICIGAARGLQYLHTGAKYTIIHRDIKTTNILLDENFVAKVSDFGLSRVGPTSASQTHVSTVVKGTFGYLDPEYYRRQILTEKSDVYSFGVVLLEVLCCRPIRMQSVPPEQADLIRWVKSNFNKRTVDQIIDSDLTADITSTSMEKFCEIAIRCVQDRGMERPPMNDVVWALEFALQLHETAKKKNDNVESLDLMPSGEVGTTTDGEDDLFSRTTGHVGKSTTTDDSVLVVGDERSGSSWGVFSEINEPKAR

SEQ ID NO: 187 - DNA, 2529 bp, Arabidopsis thaliana
  CDS (1)..(2529)
atgggaggagattttcgtcatttctcctcccacgtttctctcctcctcctcttccttctcatcgtcaaatccagttcttcattcactccagctgataactacctcatcgattgtggctcctccgacgaaacaaaactctccgacggtcgtaatttcaaatccgatcaacaatccgtcgcgtttcttcaaacagatgaagacatcaaaacctccgtcgactcaattccgatcaccgactctaatgccagtacccttcccttatacttaaccgctagaatcttcgccggaaaatcaacttactccttctacatttcacgacctggtcgtcactggatccgtctccatttttatcctctcaatcatcctctctacaatctaacaaactccgtcttctccgtcaccaccgacaccaccgtcctcttacacgatttctccgccggagatacttcttctatcgtcttcaaagaatatctaatctacgccgcagagaaactctctctttatttcaaaccacataaaggctccaccgcttttatcaacgccgttgaaatcgtctctgttccggacgagcttgttccggactctgcttcctctgttcctcaagctcctgatttcaaaggcttaagtagcttctctcttgagatccttcatcggataaatatcggaggagatttgatttctccgaagatagatcctctctcacgcacttggctctctgataaaccttacaatacgttccctgaaggttcgagaaatgtcactgttgatcctagtacgattacttatccagacggtggagctacggcgttgatcgctcctaatccggtttacgccaccgcggaggaaatggccgatgcacaaacctcgcaacctaatttcaatctctcatggagaatgagtgttgattttggtcatgattacttcattaggttacatttttgtgacattgtaagcaaatcgcttaacgaccttatcttcaatgttttcatcaacaagctctctgcaatctctgcacttgacctctcctcactaaccagcgctttaggtacagcgtattacgcggatttcgtgcttaatgcgtctacgatcaccaatggttcgatcttggttcaggttggtccgactccgaatcttcagtcgggtaaaccgaatgcgatacttaacggtttagagatcatgaagctgaacaatgctgctgggagtttagatggactttttggagttgatgggaaatacaaaggaccgatcggtggtatgtcatctaagaagcttgctattgcgggtattgggtttgtgatggcgctaaccgctttcttaggggttgtcgtgttgcttgttagatggcagagacgtcctaaagactggcaaaaacagaatagtttctcgtcatggttgcttcctttacacgcaagtcactcgagttacatctcgagcaaaggcgggtcaacgtcgaggcggatgagtattttcgggtcaaagaagagtaagagcaatggattctctagcttcttctcaaaccagggattaggtcggtactttccctttaccgaactacagaccgcgacacaaaattttgacgagaatgctgtgtgtggagtcggaggattcggaaaagtctacataggagaaattgatggtgggacgcaggtcgcgatcaaaagagggagtcagagttcggagcaaggaatcaacgagtttcaaacagagattcagatgttgtccaaactcagacatagacatttggtttctctaatcggattttgcgatgaaaacaaagagatgattctcgtctacgaatacatgtcaaacggtcctctgcgtgaccatctctacggctccaaagaaaatgaccctaaccctattcctaccttgtcctggaagcaacgtctagagatctgcattggatcagcgcgtggactccactatctccacacgggtgcagcgcaggggatcatccaccgcgacgtcaagaccaccaacatcctcttggacgagaacctagtcgctaaagtttctgattttggactttcaaaagatgcgcctatggatgaagggcatgtaagtaccgcggtaaagggtagtttcgggtatttagaccccgaatacttccgcagacaacaactcactgataaatccgatgtttactcattcggtgtggtgttattcgaggttctttgcgcgaggccagtgataaacccacagttacctagagaacaagttaacttagcagaatatgctatgaatttgcatagaaaaggtatgttggagaaaatcatcgacccgaaaatcgtgggaacgattagtaaaggatcgttaaggaaattcgtggaggctgcagaaaaatgtttggcagagtacggtgttgatcgaccgggaatgggagatgtgttgtggaatcttgaatatgctttgcagcttcaagaagcatcggctcaagttgatttatcggaggataagactacaatgaatattgaaatggaccttattcccggcgaggaaatgcaatctccgtcgcattcaataccgtga

SEQ ID NO: 188 - protein, 842 aa, Arabidopsis thaliana
MGGDFRHFSSHVSLLLLFLLIVKSSSSFTPADNYLIDCGSSDETKLSDGRNFKSDQQSVAFLQTDEDIKTSVDSIPITDSNASTLPLYLTARIFAGKSTYSFYISRPGRHWIRLHFYPLNHPLYNLTNSVFSVTTDTTVLLHDFSAGDTSSIVFKEYLIYAAEKLSLYFKPHKGSTAFINAVEIVSVPDELVPDSASSVPQAPDFKGLSSFSLEILHRINIGGDLISPKIDPLSRTWLSDKPYNTFPEGSRNVTVDPSTITYPDGGATALIAPNPVYATAEEMADAQTSQPNFNLSWRMSVDFGHDYFIRLHFCDIVSKSLNDLIFNVFINKLSAISALDLSSLTSALGTAYYADFVLNASTITNGSILVQVGPTPNLQSGKPNAILNGLEIMKLNNAAGSLDGLFGVDGKYKGPIGGMSSKKLAIAGIGFVMALTAFLGVVVLLVRWQRRPKDWQKQNSFSSWLLPLHASHSSYISSKGGSTSRRMSIFGSKKSKSNGFSSFFSNQGLGRYFPFTELQTATQNFDENAVCGVGGFGKVYIGEIDGGTQVAIKRGSQSSEQGINEFQTEIQMLSKLRHRHLVSLIGFCDENKEMILVYEYMSNGPLRDHLYGSKENDPNPIPTLSWKQRLEICIGSARGLHYLHTGAAQGIIHRDVKTTNILLDENLVAKVSDFGLSKDAPMDEGHVSTAVKGSFGYLDPEYFRRQQLTDKSDVYSFGVVLFEVLCARPVINPQLPREQVNLAEYAMNLHRKGMLEKIIDPKIVGTISKGSLRKFVEAAEKCLAEYGVDRPGMGDVLWNLEYALQLQEASAQVDLSEDKTTMNIEMDLIPGEEMQSPSHSIP

SEQ ID NO: 189 - DNA, 2821 bp, Arabidopsis thaliana
  CDS (116)..(2590)
cgaatacagagaagtgacagcaaaaacccactttctagtttctccatctcttcttctctttaatatcatcaaaccaaaacctttctcaaaccttccccaaaaaagcttcactctaatggcgtttccaataaatctaacccaaacccttctcttcttcttctgccctcttcttcatctctctttcgctgctttcactccaactgataattatctcatcaattccggttctaacaccaatacatctttcttcacaacccgttcttttctcagcgactcttcagaacctggctcgagttttctctccaccgatcgatccatctcgatttctgacacgaacccatctccagattcacccgttttgtacaacacagctcgtgttttccccgtcggaggatcatacaaattccaagtcactaccaaaggcactcactttatccgtctccatttcgcgccttttaaagcttcgagatttaacttaaggtctgctaaatttcgagttttgattaatgggttctctgtgattaacagtttcagtactagctccgtcgttgttaaagaattcatactcaaaatcgatgaccctgttttagagatttcgtttttgccctttaaagcttctggatttgggtttgttaatgcggttgaagtgttttcagcacctaaggattatataatggatcaaggaacgaagcttgtgattcctaactctgctcaaatctttagtaacttgtcatctcaagttcttgagactgttcatagaatcaacgttggtggttcgaaattgacgccgtttaatgatacgttgtggaggacttgggttgttgatgacaactatcttctcttgagagctgctgctagacgtgcttggactactcattctccgaattatcaaaacggtggtgccacgagagagattgctccggataatgtttatatgactgctcaggagatggatcgagataatcaggagttgcaggcaaggtttaacattagttgggggtttcaggttgatgagaaacgagttcttcatttggttcgtttgcatttctgcgatatcgttagttcgtcgcttaatcagctctatttcaatgtctttatcaatgagtatcttgcgtttaaggatgttgatctctccacgcttactttccatgtgcttgcgtctccgttgtacattgattttgttgcggagtctgatcgttctggaatgttgaggattagtgttggaccgtctgatcttagtaatccggcgagagttaatgctctattgaatggagttgagatcatgaggattttgagccctgtgagttctgaagtggtatctggaaagaggaatgttgtctggatcgtggttggctcggttttgggaggttttgtgttcttgtcgctgttcttcttgagcgttttgtgcttgtgcaggcgcaagaacaacaagacgaggagttcagagagcacgggatggacacctttgaggaggtttagaggcagttccaatagtagaacaactgaaagaactgttagttctagtggctaccatactctgagaatctcgttcgcggagttacaatccggaaccaataactttgatagaagtttagttatcggagttggcggattcgggatggtttttagagggtctcttaaagacaacaccaaagtagctgtgaagagaggctctcctggttcaagacagggcttaccagagtttctctctgagataaccattctctctaagatccgtcatcgccatctagtttcacttgttgggtattgcgaagaacagtctgagatgattcttgtttatgagtacatggataaaggaccactcaaaagtcacttatacggatccaccaacccgcctttatcttggaaacaacggcttgaggtctgcattggtgcagccagaggacttcattaccttcacaccggttcttcgcaaggaatcatccaccgggatatcaaatccaccaatatcttactagataacaactatgtagccaaagttgcagactttggactctcaagatccggtccttgtattgatgagacacatgtgagcaccggtgtaaaaggaagctttggatatcttgatcctgaatacttcagaagacaacagctcacggataagtccgatgtttattcatttggtgttgttctttttgaagttctttgcgctagacccgctgttgatccgttgcttgttagggagcaagtaaatttagcagaatgggcaatagagtggcaaaggaaagggatgcttgatcagatcgttgatccgaatatcgcagatgaaatcaaaccgtgctcgttgaagaaattcgctgaaaccgcagagaaatgctgtgcggattacggtgtagatagaccgacaattggcgatgttctatggaacttagaacatgtgcttcagcttcaagaatccggaccattgaacattcctgaagaagattatggagatgttaccgacccgagaacggctcggcaaggtctgtctaatggctcgaacatagagagagactatggagatggaacttcaggcataatcagtagcacccaagtgttctctcagctaatgaccaacgctgggagataaattaaagtcattgctatatagagcaagtatttatcatagtcatagagtacaatacctaaaccgggaaaccaaagcggtgtaccggtatctcagattcggttcgtgtttggtataattttgtttggtttctgtaacttgtagagctatgattgttcatttgatatggatgaatcataaaccgttaaaaccagtacattatttggttaaatattaaaccggttaagagtggag

SEQ ID NO: 190 - protein, 824 aa, Arabidopsis thaliana
MAFPINLTQTLLFFFCPLLHLSFAAFTPTDNYLINSGSNTNTSFFTTRSFLSDSSEPGSSFLSTDRSISISDTNPSPDSPVLYNTARVFPVGGSYKFQVTTKGTHFIRLHFAPFKASRFNLRSAKFRVLINGFSVINSFSTSSVVVKEFILKIDDPVLEISFLPFKASGFGFVNAVEVFSAPKDYIMDQGTKLVIPNSAQIFSNLSSQVLETVHRINVGGSKLTPFNDTLWRTWVVDDNYLLLRAAARRAWTTHSPNYQNGGATREIAPDNVYMTAQEMDRDNQELQARFNISWGFQVDEKRVLHLVRLHFCDIVSSSLNQLYFNVFINEYLAFKDVDLSTLTFHVLASPLYIDFVAESDRSGMLRISVGPSDLSNPARVNALLNGVEIMRILSPVSSEVVSGKRNVVWIVVGSVLGGFVFLSLFFLSVLCLCRRKNNKTRSSESTGWTPLRRFRGSSNSRTTERTVSSSGYHTLRISFAELQSGTNNFDRSLVIGVGGFGMVFRGSLKDNTKVAVKRGSPGSRQGLPEFLSEITILSKIRHRHLVSLVGYCEEQSEMILVYEYMDKGPLKSHLYGSTNPPLSWKQRLEVCIGAARGLHYLHTGSSQGIIHRDIKSTNILLDNNYVAKVADFGLSRSGPCIDETHVSTGVKGSFGYLDPEYFRRQQLTDKSDVYSFGVVLFEVLCARPAVDPLLVREQVNLAEWAIEWQRKGMLDQIVDPNIADEIKPCSLKKFAETAEKCCADYGVDRPTIGDVLWNLEHVLQLQESGPLNIPEEDYGDVTDPRTARQGLSNGSNIERDYGDGTSGIISSTQVFSQLMTNAGR

SEQ ID NO: 191 - DNA, 2861 bp, Arabidopsis thaliana
  CDS (144)..(2633)
atctcttgtttgttactactctgttccaatttccaaacccaaattttattacacaaaagccaaaatctggagatcaatctatcagctgatcctcaacttttgtacctttcatggaacaatttactctttaaggttttgtgaagatgggtggtgaaaagtttggatttttgatttggattttatcgattccttgcttaatcttcctctgctatggatacgtaccagtggataattacctcatcaactgtggatcatcaaccaacgtcactgtcactagtcgagtgtttatctctgataaccttgcttcaaactttctaacctctcctaatgaaatcctcgccgccagtaatcgcaattcaaattcagatatttaccagacggcgagaatcttcaccggaatctctaagtacagattctccgttgctagaggccgtcactggattcgtctccatttcaatccttttcagtaccaaaacttccaaatggtctcagcaaaattctctgtttcttcagaaacacatgttcttttgagtgatttcactgtgagttccagagttatgaaggaatactctctgaatgtagctacggatcatctggagctcacgtttactccctcgggtgattcatttgcgtttctgaacgcgctcgaggttgtttcggttcctgatacgttgttcagtggtgatccttcctttgcaggcagtcctgggaagtttcagggcttgtcatggcaagctcttgagacggtttatagagtgaacatgggcggtccgcgtgttacgcctagtaacgatactctttcgagaatttgggagcctgattctgagtttctagttgagaagaatctagttaagagtgtgtctaagattgcatctgttgattatgttcctggttttgctacagaggagactgctcctagaactgtctatggtacttgcaccgagatgaattctgcggataacccgtctagcaacttcaatgtgacttgggatttcgatgttgacccgggttttcagtactttctacggtttcatttctgcgatatcgtgagtaaagctctaaaccagctttacttcaatctttatgtcgactctatggatgttgttgagaatcttgatctgagctcttatttatccaacactttgagtggtgcatacgcgatggattttgtcacaggatcagcaaaactgactaaaagaatccgtgtgagcatcggtcgatcgagtgttcacacggattaccctactgcgattctgaacggattagagatcatgaagatgaataactccaaaagtcagctcagtattggaacatttttgcccagtggttcaagttcaaccactaagaagaatgttggtatgatcattggtttaacgatcggctcattgcttgctttagtggttttaggaggtttctttgtgctgtacaagaaacgaggacgagaccaagatggtaattcaaagacttggattcctttgtcatccaatggaacaacttcatcctcaaatggaactacacttgcaagtatagcttccaattccagttatcgaattcctttggtagcagttaaagaggccacaaatagctttgatgagaatcgagcaattggagttggtggttttggtaaagtgtacaaaggagagcttcacgacggtacaaaagtagctgttaaaagagcgaatcctaagtctcagcaaggacttgcagagttcaggacagaaatcgaaatgttgtcacaattccgtcatcgccatttggtttctttgatcggatactgcgacgagaataacgagatgattctggtttacgaatatatggagaatggaacattgaagagtcacctttacggttcaggtcttcttagcttgagttggaagcaacgtcttgagatatgcattggatcagcaagaggattgcattatctccacaccggtgacgcgaaacccgtgattcacagagacgtcaaatccgccaacatattgcttgacgagaatctcatggctaaagttgcagactttggactgtctaagaccggaccggagatcgatcagactcatgtgagtaccgcggtcaaaggaagtttcggatatcttgatccagaatacttcagaagacaacagctcacagagaaatcagatgtttactcttttggagtggttatgttcgaggttctctgcgcgagacctgttatagacccgacacttactagagaaatggtgaatctagcggaatgggcaatgaaatggcagaagaaaggacagcttgaacacatcatcgacccgtcactgcggggtaagatcagacctgactcgcttagaaagttcggtgaaacaggggagaaatgtttagctgactatggagtcgatagaccatcaatgggagatgtgttgtggaatcttgaatacgctttgcagctacaagaagctgtcgttgatggtgatccagaagacagcacaaacatgatcggtgagttacctctacggttcaatgattacaaccatggagacacgagtgttaacttttctgtagctaaagagggacggtttgatgaagaagaatcgagtgttgatgatagttcaggtgtttccatgagtaaagttttctcgcagctgatcaaatctgagggacgttaaagcgatgataaattggaaccagaatatagaatctttgttctgctctagcttttcttctgtacattttttacgattagactatgattttcattcaataaccaaaattctgaagtttgtcatcaagttgctcaatcaaacttgtaccggtttgtttcggttttatatcagctcactgttacactttaaccaaaatcggtttatgtcttaataaaggaattgagtcggttt

SEQ ID NO: 192 - protein, 829 aa, Arabidopsis thaliana
MGGEKFGFLIWILSIPCLIFLCYGYVPVDNYLINCGSSTNVTVTSRVFISDNLASNFLTSPNEILAASNRNSNSDIYQTARIFTGISKYRFSVARGRHWIRLHFNPFQYQNFQMVSAKFSVSSETHVLLSDFTVSSRVMKEYSLNVATDHLELTFTPSGDSFAFLNALEVVSVPDTLFSGDPSFAGSPGKFQGLSWQALETVYRVNMGGPRVTPSNDTLSRIWEPDSEFLVEKNLVKSVSKIASVDYVPGFATEETAPRTVYGTCTEMNSADNPSSNFNVTWDFDVDPGFQYFLRFHFCDIVSKALNQLYFNLYVDSMDVVENLDLSSYLSNTLSGAYAMDFVTGSAKLTKRIRVSIGRSSVHTDYPTAILNGLEIMKMNNSKSQLSIGTFLPSGSSSTTKKNVGMIIGLTIGSLLALVVLGGFFVLYKKRGRDQDGNSKTWIPLSSNGTTSSSNGTTLASIASNSSYRIPLVAVKEATNSFDENRAIGVGGFGKVYKGELHDGTKVAVKRANPKSQQGLAEFRTEIEMLSQFRHRHLVSLIGYCDENNEMILVYEYMENGTLKSHLYGSGLLSLSWKQRLEICIGSARGLHYLHTGDAKPVIHRDVKSANILLDENLMAKVADFGLSKTGPEIDQTHVSTAVKGSFGYLDPEYFRRQQLTEKSDVYSFGVVMFEVLCARPVIDPTLTREMVNLAEWAMKWQKKGQLEHIIDPSLRGKIRPDSLRKFGETGEKCLADYGVDRPSMGDVLWNLEYALQLQEAVVDGDPEDSTNMIGELPLRFNDYNHGDTSVNFSVAKEGRFDEEESSVDDSSGVSMSKVFSQLIKSEGR

SEQ ID NO: 193 - DNA, 2789 bp, Arabidopsis thaliana
  CDS (1)..(2568)
atggtgttcacaaaatcattacttgttcttctttggttcctctcttgttacactactactacttcatcagctttgtttaatccgccagacaattacttgatctcttgtggctcatcacaaaacataactttccaaaacagaatctttgttccagattcactccactcttctcttgtactcaaaatcggaaactcttctgttgcaacatcaactacttccaacaattcaaccaattccatctaccaaaccgctcgtgttttctccagtttagcttcttacagattcaaaatcacttctttaggtcgacattggatccgtcttcatttctcacctatcaacaactctacttggaacttaacctctgcttcaatcactgtcgtaacagaagacttcgtgctcttgaacaacttctccttcaacaacttcaacggttcttacatcttcaaagagtacacagtcaatgtcacttcagagttcttgactttaagtttcattccttcaaacaattcggtggtctttgtcaacgctattgaagttgtctctgttccggataatcttatccctgatcaagctttggcgttaaacccttcaacaccatttagtggtctctctctgcttgcatttgaaacagtctacagattaaatatgggaggaccattgttgacttctcaaaacgatacattggggagacaatgggataatgatgcagagtatcttcatgtgaacagctctgttcttgttgtaacggcgaatccttcttcgattaagtactctccttctgtgactcaagaaacagctcctaacatggtttatgcaactgctgatacaatgggtgatgctaatgttgcgagtccaagttttaatgttacttgggttcttcctgttgatccagacttcaggtactttgttcgtgttcatttctgtgatattgtgagtcaagctttgaacacgcttgttttcaatctttatgtgaatgatgatcttgctcttggaagtcttgatctctctacgttgactaatggtcttaaagttccttactttaaggattttatctccaatggttctgttgaatcttccggtgttttaaccgttagcgttggacctgattcacaagctgatatcactaatgcgactatgaatgggttagaggttttgaagattagtaacgaagctaagagcttaagtggtgtttcttcggttaagtcgttacttccgggaggatcaggttctaagagcaagaagaaggcagtgatcattggttctttggttggtgcggttacattgattctgctgattgctgtttgttgctattgctgtttggttgcttcaaggaagcagaggtcgacgagtcctcaagaaggcggtaatggacatccgtggttgccattacctttatatggactctctcagactcttactaaatcaaccgcttctcacaagagtgccacagctagttgcatttcattagcttctactcatcttggacgttgctttatgtttcaagaaatcatggacgctactaataagttcgatgagagttcgttgcttggggttggtggatttggccgcgtttataaaggaactttagaagacgggactaaagtcgcggttaaaagaggtaacccgagatcagaacaaggtatggctgagttcagaacagagattgaaatgctgtcaaaactcagacatcgacatctcgtctctcttatcggttactgcgacgagaggtctgaaatgatactggtctatgagtacatggcgaatggaccgttgaggagtcatctatatggagctgatcttcctccattgtcttggaaacaaagactcgagatttgcatcggtgcagcgagaggattacattatctacacaccggtgcatcgcagagcattatacaccgtgatgttaaaaccacgaatatcttactcgacgagaatctagtcgccaaagttgcagactttggactatccaaaaccggcccttcgctcgatcaaacacacgtgagcacggcggttaaaggaagctttggttatctagacccggaatacttcaggagacagcagttaacagagaaatcagacgtttattcgtttggtgttgtactaatggaagtactctgttgtagaccggctttaaacccggtattacctagagaacaagtgaacatagcggaatgggcaatggcgtggcagaaaaagggtctgctagatcaaatcatggacagtaacttaaccgggaaggtgaaccctgcctcgttgaagaaatttggagaaaccgcagagaaatgtttagcggaatacggtgtggaccggccttctatgggagatgtattgtggaatttggagtacgcgttacagctagaagaaacatcttcggctttgatggagcctgatgacaatagtacaaaccacattccagggattccaatggcgccaatggaaccgtttgataacagtatgagtataatcgatagaggaggagtaaattcggggaccgggactgatgatgatgcggaagacgcgactactagtgcggtgttttcgcagcttgttcatcctcgtggaaggtagaagaagaacacatttggtgaaaacaacagcagagacagacattgtttgtttttgaaaaatttatagaaagaaagttatttattgaagacttttgggaacaaacaacaaaatgattcattcagcatttattttcgattttttacggtgtatttgttttgtaatatagtgagtactgatgttttaaagcaaatcatgaatcagaatgtgattatatatcttaa

SEQ ID NO: 194 - protein, 855 aa, Arabidopsis thaliana
MVFTKSLLVLLWFLSCYTTTTSSALFNPPDNYLISCGSSQNITFQNRIFVPDSLHSSLVLKIGNSSVATSTTSNNSTNSIYQTARVFSSLASYRFKITSLGRHWIRLHFSPINNSTWNLTSASITVVTEDFVLLNNFSFNNFNGSYIFKEYTVNVTSEFLTLSFIPSNNSVVFVNAIEVVSVPDNLIPDQALALNPSTPFSGLSLLAFETVYRLNMGGPLLTSQNDTLGRQWDNDAEYLHVNSSVLVVTANPSSIKYSPSVTQETAPNMVYATADTMGDANVASPSFNVTWVLPVDPDFRYFVRVHFCDIVSQALNTLVFNLYVNDDLALGSLDLSTLTNGLKVPYFKDFISNGSVESSGVLTVSVGPDSQADITNATMNGLEVLKISNEAKSLSGVSSVKSLLPGGSGSKSKKKAVIIGSLVGAVTLILLIAVCCYCCLVASRKQRSTSPQEGGNGHPWLPLPLYGLSQTLTKSTASHKSATASCISLASTHLGRCFMFQEIMDATNKFDESSLLGVGGFGRVYKGTLEDGTKVAVKRGNPRSEQGMAEFRTEIEMLSKLRHRHLVSLIGYCDERSEMILVYEYMANGPLRSHLYGADLPPLSWKQRLEICIGAARGLHYLHTGASQSIIHRDVKTTNILLDENLVAKVADFGLSKTGPSLDQTHVSTAVKGSFGYLDPEYFRRQQLTEKSDVYSFGVVLMEVLCCRPALNPVLPREQVNIAEWAMAWQKKGLLDQIMDSNLTGKVNPASLKKFGETAEKCLAEYGVDRPSMGDVLWNLEYALQLEETSSALMEPDDNSTNHIPGIPMAPMEPFDNSMSIIDRGGVNSGTGTDDDAEDATTSAVFSQLVHPRGR

SEQ ID NO: 195 - DNA, 2706 bp, Oryza sativa
  CDS (1)..(2706)
atgcgccgccgcgggaggatgatcccgccggcgctgctgctggccgccgcggtggcggcggcgctcgcgacggccgtgtcggggcaggggcggccggtcaccgagagcggcgcgcagacggcgccgacgccgtcgacgttcacgcccaaggacaacttcctcatcgactgcggcagcacgagccccgtcaccaccggcggcaaggtgtacaagacggacgcgcagtcgaacagccttctctccgccaaggacgccatcaaggtcgccaccaccgacgccgacgtgccctcgccgctctacctcaccgcccggatcttccgcgacgaggccgtctacagcttcccgctcaccgtcccgggctggcacttcgtccgcctctacctcttcccgctcaagaactccgacttcgacctcaccaccgccaccttcaccgtctccaccgacaccaacgtcctcctccacagcttcaccgccgagaacaagccggtcatgaaggagttcctcgtgaacgccaccgagaaccacctcgccgtcaagttctacccgctcaagggctccgccgcgttcatcaacgccatcgaggtcgtgaacgcccccgacgagctcatcacagacatggccatggggatcgctcccgtcggagagatgaccgggctcgccgaggcggcgtaccaggtggtgtaccggatcaacgtcggcggcccggccatcgcgcccgacaaggatacgctggggcggcagtgggacgtggacgcgccgtacgtgcagtcgaaggaggcggtgaaggacgtgtcggtgccggtggggaacatcaagttccccgacgggacgtcgaagctggtggcgccggcgcaggtgtacgcgagctgcgcgaagatggcggacgccggcgtggggagcccgagcttcaacatgtcgtggaagatggaggtggacccggcgttcggctacctggtccggctcttcttcgcggacatcgtgagcaagagcatgaacgacctctacttcaacgtgttcgtcaacgggcgcaaggccatctccgggctggacctgtcgacggtgaccggcgagctgtcggcggcgtactacaaggacatcgtcgtcaactcgtcgatcgcgacggacaagctgagcatccaggtggggccgatgggggaggacacggggcgcgtggacgcgctgctcagcggcgtggaggtgctcaagatgagcaactcggtggggagcctcgacggcgagttcggcgtggacgggaagaaggccgacgacggcagcggcagccgcaaggccgtggcggcggtggggttcgcgatgatgttcggcgcgttcgccggcctgggagccatggccgtcaagtggtacaagcggccccaggactgggagcgccggaacagcttctcgtcgtggctgctccccatccacaccggccaatccttcaccaccagcaagggcgggtccagcaagagcggctacaccttctcctccaccctcggcctcggccgcttcttctccttcgccgagatccaggccgcgaccaagaacttcgaggagagcgccatcatcggcgtcggcggcttcggcaacgtctacatcggcgagatcgacgacggcaccaaggtcgccgtgaagcgcgggaacccgcagtcggagcaagggatcaacgagttcaacaccgagatccagatgctgtccaagctccgccaccgccacctcgtctccctcatcggctactgcgacgagaacgccgagatgatcctcgtctacgagtacatgcacaatggccccttccgcgaccacatctacggcaaggacctgccggcgttgacgtggaagcagcggctggagatctgcatcggcgccgcccgcggcctccactacctgcacaccggcacggcgcaggggatcatccaccgcgacgtcaagaccaccaacatcctcctcgacgacaacttcgtcgcaaaggtatccgactttgggctgtccaaggacggccccgggatgaaccagctgcacgtcagcaccgccgtcaagggcagcttcggctacctcgacccggagtacttccggtgccagcagctgacggacaagtccgacgtctactccttcggcgtcgtgctcctcgagacgctgtgcgcgcggccgcccatcgacccgcagctgccgcgcgagcaggtcagcctcgccgagtgggggatgcagtggaagcggaagggcctcatcgagaagatcatggaccccaagctcgccgggacggtgaaccaggagtcgctcaacaagttcgccgaggccgccgagaagtgcctcgccgagttcggcagcgacaggatctccatgggcgacgtgctctggaacctcgagtacgcgctccagctgcaggacgccaacccgcccgagggggccgacaagccagccgaccacgacggcgccggcgcggccccggcgacctcctccggctccggcgtctccaccgtgcccgacgtgtccaccaccgccgccggcgagatgttcgcgcagctcgccgacatgaaggggagcagcatgcatgatgcagtgatcgatcgagattatttcatcatcaatccatcgatcgtcgcggtggaacgtaaactgaaagctatcaaaatcgaattacttgtcgatttcctgcccgatttaagatggccggtcgcagtgtcttggattggcgatggcgagaaaccaaattga

SEQ ID NO: 196 - protein, 901 aa, Oryza sativa
MRRRGRMIPPALLLAAAVAAALATAVSGQGRPVTESGAQTAPTPSTFTPKDNFLIDCGSTSPVTTGGKVYKTDAQSNSLLSAKDAIKVATTDADVPSPLYLTARIFRDEAVYSFPLTVPGWHFVRLYLFPLKNSDFDLTTATFTVSTDTNVLLHSFTAENKPVMKEFLVNATENHLAVKFYPLKGSAAFINAIEVVNAPDELITDMAMGIAPVGEMTGLAEAAYQVVYRINVGGPAIAPDKDTLGRQWDVDAPYVQSKEAVKDVSVPVGNIKFPDGTSKLVAPAQVYASCAKMADAGVGSPSFNMSWKMEVDPAFGYLVRLFFADIVSKSMNDLYFNVFVNGRKAISGLDLSTVTGELSAAYYKDIVVNSSIATDKLSIQVGPMGEDTGRVDALLSGVEVLKMSNSVGSLDGEFGVDGKKADDGSGSRKAVAAVGFAMMFGAFAGLGAMAVKWYKRPQDWERRNSFSSWLLPIHTGQSFTTSKGGSSKSGYTFSSTLGLGRFFSFAEIQAATKNFEESAIIGVGGFGNVYIGEIDDGTKVAVKRGNPQSEQGINEFNTEIQMLSKLRHRHLVSLIGYCDENAEMILVYEYMHNGPFRDHIYGKDLPALTWKQRLEICIGAARGLHYLHTGTAQGIIHRDVKTTNILLDDNFVAKVSDFGLSKDGPGMNQLHVSTAVKGSFGYLDPEYFRCQQLTDKSDVYSFGVVLLETLCARPPIDPQLPREQVSLAEWGMQWKRKGLIEKIMDPKLAGTVNQESLNKFAEAAEKCLAEFGSDRISMGDVLWNLEYALQLQDANPPEGADKPADHDGAGAAPATSSGSGVSTVPDVSTTAAGEMFAQLADMKGSSMHDAVIDRDYFIINPSIVAVERKLKAIKIELLVDFLPDLRWPVAVSWIGDGEKPN

SEQ ID NO: 197 - DNA, 2535 bp, Oryza sativa
  CDS (1)..(2535)
atgaggctacttgcgctggcagttgcaagcatcgtgcttgctaatttgcacctgttgggagttcatgggagggatttgcttctcagctgtggttcaaacgcgactgtggatgctgacggccggagatggatcggcgacatggcccccgggctgaattttaccttaagcagccctggaatagctgcgtcgcaggctgggagcagcaatgccaatgaaatcttcggactggtgtaccattccgcgcgtttctttagcacggcatcttggtataacttcagcgtgctgccggggaactactgcctcagcctgcatttcttcccttacacattcgggaatttcagtgggaatgattcattgtttgatgtcactgcaaatgatttcaagctggtctcgaaattcaacgtgtcagaggagattgtttggaggagcactgtgagcaattcagccatcaatgcagttgtcaaggagtattttcttttagttggttctcgtggtctgcaggttgagtttgatccaagccctgggtcatttgcctttgtgaatgcaattgaggtgatgctcactccagataacctgttcaatgacacagtaaacaaagttggcagcgctggaaatgggcagcttcctcttggtttaagcaacagaggcctagagacaatgtaccggttgaatgttggagggcatgcacttaattcttccagcgatcagtatctgcacagaccatggtacactgatgaagcattcatgttttctgcgaatgctgctcagattgtgtccaacacttcaagtgtaagttatctctcaaacaatgactcctcaatttctcccattgatgtatacgagactgcaagaatcatgagcaacaacatggttgtggacaagcggttcaatgtttcatggcgattctatgtccaccccaactttgattacttggtccgccttcatttctgtgagcttttctatgacaagcccaaccagagggtcttcaagatctacatcaacaacaagacagctgctgaggactatgatgtgtatgtcagggcagggggtattaataaggcatatcatgaagactattttgacaacttgccacagcaggtagactcactctggcttcagctaggccctgactccttgaccagtgcttcaggcaccgatccacttctgaatggtttggagatattcaagctcagcaggaatggcaacctcgcttatgttcttggccatattgacatgggtaaccaaaggggtatttccaaggatagaaataggaaaattttatgggaagaagtcggaattggctcagcttcttttgtgacactgacaagtgtggttctatttgcatggtgctatataagaaggaaacgaaaagctgatgagaaggagccccctcccggttggcacccactggtcctccatgaggctatgaaaagcaccacagatgcccgtgcagccggtaaatcacccttgacacgtaattcatcttccattggtcatagaatgggcagaagattcagcatttcagagattagggctgctacaaagaactttgatgaggctttgcttattggtactggtggttttggcaaggtttacaagggtgaggtcgatgagggtactacagtggcaatcaagcgtgcaaatccattatgtggccagggcttgaaagaatttgaaacagaaattgagatgctctccaagcttaggcaccggcaccttgttgcaatgattggctactgtgaagagcagaaggaaatgattctagtctacgaatacatggccaaggggacattgcgaagccatctttatggaagtgacctcccacctctgacatggaagcaacgagttgatgcctgcattggtgcagctcgtgggcttcactacctccacactggagcagaccgaggtataatccatagggatgtgaagactacaaacatcttgttggatgagaattttgttgcaaagatagcagattttggtctgtctaaaactggcccaacactggaccagacccatgttagtacagcagtcaagggaagctttgggtaccttgatcctgagtacttccggaggcagcaactcacacaaaaatctgatgtgtattcttttggagtggtgctctttgaagtcgcttgtggcagaccagttatagaccccactctaccaaaggatcaaatcaacttggcagagtgggcaatgagatggcagcgccagcgttcgctggatgcaatagtggatccacggctggacggtgacttttcatctgaatccttgaagaagtttggtgaaattgcggagaagtgccttgctgatgatgggagaagcaggccatcgatgggtgaggtcttgtggcatctggaatatgtgctgcagctccatgaagcttacaagcgtaataatgtggactgtgaatcatttggaagcagtgaactgggattcgccgatatgtcctttagcctgcctcatatcagagagggagaagaggaacatcactcaaagccatctagtataagagaagatccagacacttga

SEQ ID NO: 198 - protein, 844 aa, Oryza sativa
MRLLALAVASIVLANLHLLGVHGRDLLLSCGSNATVDADGRRWIGDMAPGLNFTLSSPGIAASQAGSSNANEIFGLVYHSARFFSTASWYNFSVLPGNYCLSLHFFPYTFGNFSGNDSLFDVTANDFKLVSKFNVSEEIVWRSTVSNSAINAVVKEYFLLVGSRGLQVEFDPSPGSFAFVNAIEVMLTPDNLFNDTVNKVGSAGNGQLPLGLSNRGLETMYRLNVGGHALNSSSDQYLHRPWYTDEAFMFSANAAQIVSNTSSVSYLSNNDSSISPIDVYETARIMSNNMVVDKRFNVSWRFYVHPNFDYLVRLHFCELFYDKPNQRVFKIYINNKTAAEDYDVYVRAGGINKAYHEDYFDNLPQQVDSLWLQLGPDSLTSASGTDPLLNGLEIFKLSRNGNLAYVLGHIDMGNQRGISKDRNRKILWEEVGIGSASFVTLTSVVLFAWCYIRRKRKADEKEPPPGWHPLVLHEAMKSTTDARAAGKSPLTRNSSSIGHRMGRRFSISEIRAATKNFDEALLIGTGGFGKVYKGEVDEGTTVAIKRANPLCGQGLKEFETEIEMLSKLRHRHLVAMIGYCEEQKEMILVYEYMAKGTLRSHLYGSDLPPLTWKQRVDACIGAARGLHYLHTGADRGIIHRDVKTTNILLDENFVAKIADFGLSKTGPTLDQTHVSTAVKGSFGYLDPEYFRRQQLTQKSDVYSFGVVLFEVACGRPVIDPTLPKDQINLAEWAMRWQRQRSLDAIVDPRLDGDFSSESLKKFGEIAEKCLADDGRSRPSMGEVLWHLEYVLQLHEAYKRNNVDCESFGSSELGFADMSFSLPHIREGEEEHHSKPSSIREDPDT

SEQ ID NO: 199 - DNA, 2697 bp, Oryza sativa
  CDS (1)..(2697)
atggcgagtgcccctctcctctcgtggacccggcaagcgctcccagtcgctgacacggttcggtgctcgccggcggtggcgctggcgctcgtcgtggcggcggcggccgcggccgcggcgacggcgaagctgtacagcccggcggacaggatcctggtgaactgcgggtcgacgacggacgggctggacgcggaggggcgcaggtgggtggcggacgcgacgaacgacacgtggctgacggactccggcaagtcttcgatcatggcggccgccgacgagctggagacgatgctgccgtcgtccatcccctacatgacggcgcgggtgtttaccatggacacggtgtacaacttcacggtgaacccgcgcgaccgccactggatccggctccacttctacccgtcgtcgtacaacgggctggagccccaggacttccggttctccgtcttcaccaccacgggatacacgctgctccacaacttcagcgtctacttcaccaccaaggcgctcacccaggcgtacctcatcagggagtactcgctgccgcgtgtcccggagggccacttcggcgtcaccttctcgccgtcgcccatgatgaacgtcacctacgccttcgtcaacggcatcgaggtgatctccatgccggacatgttcaacaacccggccaccatggtcggcttcgccgaccagaccgccgacgtctccgccgccgcgttccagaccatgtaccgcctcaacgtcggcggcgcctacatcccgccgtccaacgactccggcctcacgcggccgtggtacgacgacacgccgttcgtccagggccccctgcgcggcctcgtctacaacgccggcccgcacttccacatcaagtaccccagcgacgccgccgagtacgccgcgccgccggaggtgtacctcggcggccgctccatgggcagggaccagcgcctcaaccagaactccaacctcacctggagcctccacgtggagtgcaacttcacctacgtcgtgcgcctccatttctgcgagctccagctcatccacggcaaccagcgggtgttcgacatctacatcaacaaccggacggcgcagacggacgtggacgtgctggagatggcgacggagcgcggcgtgccggtgtacaaggactacgcggtgaggctgagcaacgacaccgccgacgagcatctgtgggtggcggtgcacccctcggtgatgctccgcccgcagttctacgacgccatcctcaacggcctcgaggtgttcaaggtgaacaacaccggcggcagcctggcgtcgccggaccccgtcccgtacaagctgctcgcggagaaggagctcggctggggcgggccgccggagttctccaccgacaacccggccaacatggcgtcggtgatgggcggcacggcgggcggcgcggcggcggccgggatcgtggcggccatctgcgtggtggtgtacagcaacaagaggagcaagaagctgggcggcggcggcgccgactcgcacacctccgcgtggctgccgctgtaccactcccacaccagcggcaagtcgtcggggcacatcacggcgaacatcgccggcatgtgccgccacttctcgttcgcggagatcaaggcggcgaccaagaacttctccaacgacctggccatcggcgtgggcgggttcggcgtggtgtaccgcggcgtggtggacggcgacgtgaaggtggcggtgaagcggtccaacccgtcgtcggagcaaggcataaccgagttccagacggaggtggagatgctctccaagctccgccaccgccacctcgtctccctcatcggcttctgcgaggaggacggcgagatggtgctcgtctacgactacatggagcacggcaccctgcgcgagcacctctaccacaacggcggcaagcccacgctgtcgtggcgccaccgcctcgacatctgcatcggcgccgcccgcggcctccactacctccacaccggcgccaagtacaccatcatccaccgcgacgtcaagaccaccaacatcctcgtcgacgacaactgggtcgccaaggtctccgacttcggcctctccaagtccggccccaccacgctcaaccagtcgcacgtcagcaccgtcgtcaagggcagcttcggctacctcgacccggagtactaccgccggcagcagctcaccgacaagtccgacgtctactccttcggcgtcgtgctgttcgaggtgctcatggcgcgcccggcgctcgacccggcgctgccgcgcgaccaggtcagcctcgccgactacgcgctcgcctgcaagcgcggcggcgcgctgccggacgtcgtcgacccggcgatcagggaccagatcgcgcccgagtgcctcgccaagttcgccgacacggcggagaagtgcctctccgagaacggcaccgagcgccccaccatgggcgacgtgctctggaacctcgagagcgcgatgcacttccaggacgcgttcgacgccgccgccggccgccccgtccccgcgctcgacgccgccgccggcagcagcagccacctcgacgacgggagcacggccagcatcaacacgctggccacgtcgtccacgtcgcacccgcacgagccgtgcgtcgacgttgtcttggagcccgacgacgtcgtcgcggagcgcgccaccttctcgcagctcgtccagcccaccggccggtga

SEQ ID NO: 200 - protein, 898 aa, Oryza sativa
MASAPLLSWTRQALPVADTVRCSPAVALALVVAAAAAAAATAKLYSPADRILVNCGSTTDGLDAEGRRWVADATNDTWLTDSGKSSIMAAADELETMLPSSIPYMTARVFTMDTVYNFTVNPRDRHWIRLHFYPSSYNGLEPQDFRFSVFTTTGYTLLHNFSVYFTTKALTQAYLIREYSLPRVPEGHFGVTFSPSPMMNVTYAFVNGIEVISMPDMFNNPATMVGFADQTADVSAAAFQTMYRLNVGGAYIPPSNDSGLTRPWYDDTPFVQGPLRGLVYNAGPHFHIKYPSDAAEYAAPPEVYLGGRSMGRDQRLNQNSNLTWSLHVECNFTYVVRLHFCELQLIHGNQRVFDIYINNRTAQTDVDVLEMATERGVPVYKDYAVRLSNDTADEHLWVAVHPSVMLRPQFYDAILNGLEVFKVNNTGGSLASPDPVPYKLLAEKELGWGGPPEFSTDNPANMASVMGGTAGGAAAAGIVAAICVVVYSNKRSKKLGGGGADSHTSAWLPLYHSHTSGKSSGHITANIAGMCRHFSFAEIKAATKNFSNDLAIGVGGFGVVYRGVVDGDVKVAVKRSNPSSEQGITEFQTEVEMLSKLRHRHLVSLIGFCEEDGEMVLVYDYMEHGTLREHLYHNGGKPTLSWRHRLDICIGAARGLHYLHTGAKYTIIHRDVKTTNILVDDNWVAKVSDFGLSKSGPTTLNQSHVSTVVKGSFGYLDPEYYRRQQLTDKSDVYSFGVVLFEVLMARPALDPALPRDQVSLADYALACKRGGALPDVVDPAIRDQIAPECLAKFADTAEKCLSENGTERPTMGDVLWNLESAMHFQDAFDAAAGRPVPALDAAAGSSSHLDDGSTASINTLATSSTSHPHEPCVDVVLEPDDVVAERATFSQLVQPTGR

SEQ ID NO: 201 - DNA, 2553 bp, Arabidopsis thaliana
  CDS (1)..(2553)
atgagcgggaaaactcggattctctttttcctcacatgtctctcctttctattggtttttccaactagatctaacggacaagatttagctctgagctgcgggacatcagaagcttctgctgaccaagataagaaaaaatgggaaccagatacaaagtttttaaagactggaaactcaattcacgcaacggctacatatcaagacccttcacttctctcaacagttccttatatgacagccagaatctttacagctccagcaacttatgaaatcccgattaaaggagataaaagacatttgcttcggttatatttctacccatcaacatacaccggtctcaacatttccaactcgtatttcactgtggaagctaacgatgttaccttactgagcaatttcagcgccgcgattacgtgtcaagctttgactcaagcttatctggttaaagaatactctcttgcacccactgacaaagatgttttgagcatcaagtttaccccttcagataaataccgagacgcatttgcctttataaacggtatcgaggtgattcagatgccggaattgtttgacacggcggctcttgttggtttcacagaccaaacaatggatgccaagactgcgaatcttcagtcaatgtttagacttaatgttggtggtcaggacatccctggaagccaagactccggtgggttgacaagaacttggtataatgatgcaccttacatctttagtgcgggtcttggtgttacacttcaagcaagcaacaattttaggatcaactaccagaacatgccggtgtctatagctccagccgatatatacaaaaccgcaagatctcaaggcccaaacggagatatcaacctcaaatccaatcttacatggatgttccaaatcgataagaacttcacctacattttgagactccatttctgcgaattccagctttccaagatcaaccagaaggttttcaacatttacatcaataacagaacagcgcaggcagatactactcctgcagatataatagggtggacaggagagaaaggaatcccgatgtacaaagactacgcgatatatgttgatgccaacaacggaggcgaagagattacacttcagatgactccatcaacttttggtcaaccggaatattatgattcatctcttaacgggttagagattttcaagatggacaccatgaaaaatcttgcgggtccaaaccccgagccatcgcctatgcaagctgaggaagaggttaaaaaagaattcaagaacgaaaagagacacgctttcatcattggttcggccggaggagttttagcggttttaatcggtgccttgtgtttcacggcctacaagaagaaacaaggatatcaaggaggcgactctcacacatcaagttggcttcctatatatggaaactctaccacatcaggaaccaaatcaaccatctcagggaagagcaacaatggaagtcacctatccaatctcgcagcaggtttatgccgtagattctctttaccagaaatcaaacacggaacacaaaacttcgatgattccaacgtcattggagttggagggtttggtaaagtctacaaaggagttatagacggcacaactaaagtagcggtaaaaaaatcaaacccaaattcagaacaaggactcaacgaattcgagacagaaatcgaactcctctcaagactaagacacaaacacttagtctccttgataggatactgcgacgagggaggagaaatgtgtctcgtatacgattacatggcatttggaacactccgtgagcatctatacaacacaaagaaaccacaattaacttggaaacgaaggctagagatagctattggagcagcaagaggattacattaccttcacacaggagcaaagtacacgattatacacagagacgttaaaacaactaacatcctcgtagatgagaactgggtagccaaagtttcagactttgggttatccaaaactggacctaacatgaatggaggccatgtaacaaccgtcgtcaaaggaagcttcggttatttagatcctgaatacttcagaagacaacaactgactgagaaatcagacgtttactcattcggagttgttctgttcgaaatcttatgcgcaagaccagcgttaaacccgagtttgcctaaggaacaagtgagtctcggagactgggcaatgaattgcaaacgaaaagggaatttagaggatataatcgatccgaatctgaaagggaagatcaatgcagagtgtttgaagaaatttgcagacacggcggagaagtgtcttaacgatagtggattagaacggccgacaatgggagatgttttgtggaatctcgaattcgcacttcagcttcaagagactgctgacgggactcgtcatcggactccgaataatggaggaagctctgaggatctcggtagaggaggcatggcggttaacgtcgccggtagagatgatgtgagtgatctctcctcagaggacaataccgaaatattctctcagattgtaaatcccaaaggacgataa

SEQ ID NO: 202 - protein, 850 aa, Arabidopsis thaliana
MSGKTRILFFLTCLSFLLVFPTRSNGQDLALSCGTSEASADQDKKKWEPDTKFLKTGNSIHATATYQDPSLLSTVPYMTARIFTAPATYEIPIKGDKRHLLRLYFYPSTYTGLNISNSYFTVEANDVTLLSNFSAAITCQALTQAYLVKEYSLAPTDKDVLSIKFTPSDKYRDAFAFINGIEVIQMPELFDTAALVGFTDQTMDAKTANLQSMFRLNVGGQDIPGSQDSGGLTRTWYNDAPYIFSAGLGVTLQASNNFRINYQNMPVSIAPADIYKTARSQGPNGDINLKSNLTWMFQIDKNFTYILRLHFCEFQLSKINQKVFNIYINNRTAQADTTPADIIGWTGEKGIPMYKDYAIYVDANNGGEEITLQMTPSTFGQPEYYDSSLNGLEIFKMDTMKNLAGPNPEPSPMQAEEEVKKEFKNEKRHAFIIGSAGGVLAVLIGALCFTAYKKKQGYQGGDSHTSSWLPIYGNSTTSGTKSTISGKSNNGSHLSNLAAGLCRRFSLPEIKHGTQNFDDSNVIGVGGFGKVYKGVIDGTTKVAVKKSNPNSEQGLNEFETEIELLSRLRHKHLVSLIGYCDEGGEMCLVYDYMAFGTLREHLYNTKKPQLTWKRRLEIAIGAARGLHYLHTGAKYTIIHRDVKTTNILVDENWVAKVSDFGLSKTGPNMNGGHVTTVVKGSFGYLDPEYFRRQQLTEKSDVYSFGVVLFEILCARPALNPSLPKEQVSLGDWAMNCKRKGNLEDIIDPNLKGKINAECLKKFADTAEKCLNDSGLERPTMGDVLWNLEFALQLQETADGTRHRTPNNGGSSEDLGRGGMAVNVAGRDDVSDLSSEDNTEIFSQIVNPKGR

SEQ ID NO: 203 - DNA, 2633 bp, Arabidopsis thaliana (mouse-ear cress)
  CDS (76)..(2580)
agaccacacatgttttttcatccattgacctcaaagacttgactttctctctttctccttctctgcatcaaagctatggagaatttctgttttcaagactctgtttctctatttatcacgatcatggttcttgttcttctcccccgtctcagtctttctgatacttcgacgtacacccgtcctgagaatttttacgtcaactgtggatcggattctaatgtattttatggtggccagaccttcgtcggagataccaactcgagtactaactcagtttccttcaccaacaaaggaactgaagtcatcaacgaccaatcgtccgttgcgcctgaaatataccggacggttaggatatttagacacccttcttcttacaagttcaaacttgattctctgggtctgcactttgtgcgtctccatttctctgttgtgttttctcgggcagatcttttaactgctcggttcactgtctctgctacctctggttctaatcatcacttgaaaagtttctcgcctcagaatctcactaataccccacgagttgaagagtttctcctgatgatgaactcgctggagttcgaaattcgatttgtgcccgatcattcctctttagctctcatcaatgccatcgaagtgttctctgctcctgatgacctcgaaatcccatcagcttccgataagaatctgcatacgatttacagattaaacgtaggaggcgagaaaatcactccggataatgataccttgggacgaacttggctgcctgacgatgatgactttctctaccgaaaagattcagcgaggaacattaattcaacacaaacgcctaactacgtgggagggttaagttcagccacggactccactgctcctgatttcgtctacaagacagctaaagcaatgaaccgtagctcgaatgagcaggtggggatgttgatgaatgttacatggtcgttcaaggtcaaaagtaaccatagacacttcatcaggattcatttttctgatattttgagcaacttatcaaactccgactccgatttctatctctttgtaaatgggtattggcgagtagatgtaaagccttcagagcagcctaggttggcgagtccgttttttaaggatgtcgtgaatgtctctgatggttctggactcttgaatatcagtataggtaccaaggaggccaataaggatgctggttttctgaatggtctggagatgatggaggttttgagtaaatctggttctgattattcaaatagaagcagttcccgggttcacatcatcactggttgtgctgttgctgctgctgctgcatcagctttggtcttcagtttgctgtttatggtattcttgaagcggaggagatcgaagaagactaagccagaggttgagggcactgtatggtctcctttgccattgcacagaggtgggagttcagacaatagacctatctctcaataccacaactccccattacgcaacctacacttaggcttaacgattcccttcacagacattctaagcgctacaaacaacttcgacgagcagttgttgatcgggaaaggcgggtttggctacgtttacaaagctattcttcccgatggaaccaaagccgctatcaaacgaggcaaaaccggctcaggacaagggatcttagagtttcaaaccgagattcaagtcctctcaagaatccgacatagacacctcgtctcgctaacgggatactgcgaagaaaactccgaaatgatcctcgtctacgagtttatggagaaaggtacactcaaagaacatctatacggctcgaatctaccttcattaacatggaaacaaagactagagatatgcattggagcagctagaggtttagattatctccacagtagtggctcagaaggagcaatcattcacagagacgtcaaatcaacaaacatattactagacgagcacaatatagcaaaagtcgcagatttcggattatcgaaaattcataatcaagatgaaagcaatatcagcataaacatcaaaggaacattcggttacttggatccagaatatctccaaacacataaattaacagagaaatcagatgtttacgcattcggagtcgtcctcctcgaggtactgttcgcgagaccagctatagatccttatcttcctcacgaagaagtgaatctatcggaatgggtgatgttctgcaaatcaaaaggtacaatcgatgagatcttagatccgagtttgataggtcaaattgagacgaattcgttgaagaaattcatggaaattgctgagaaatgtttgaaagagtatggagatgagagaccgagtatgagggatgtgatttgggatcttgagtatgttcttcagctacagatgatgacgaatcgtcgagaggctcatgaagaagatagtacggcgattaattccggtggttcgttggttgctccgaggttgatggtgagtgattcgtttagtacgaactcgatatttcagaatggtgatgaatcgaagaacagatttggatttacagattcatcggagactcgagttttttcgcagttgaagatctctgatgcaagatgatgaaatctttcgcaattgtgtgtaaaattataattttttcgaaatgtgaagtt

SEQ ID NO: 204 - protein, 834 aa, Arabidopsis thaliana (mouse-ear cress)
MENFCFQDSVSLFITIMVLVLLPRLSLSDTSTYTRPENFYVNCGSDSNVFYGGQTFVGDTNSSTNSVSFTNKGTEVINDQSSVAPEIYRTVRIFRHPSSYKFKLDSLGLHFVRLHFSVVFSRADLLTARFTVSATSGSNHHLKSFSPQNLTNTPRVEEFLLMMNSLEFEIRFVPDHSSLALINAIEVFSAPDDLEIPSASDKNLHTIYRLNVGGEKITPDNDTLGRTWLPDDDDFLYRKDSARNINSTQTPNYVGGLSSATDSTAPDFVYKTAKAMNRSSNEQVGMLMNVTWSFKVKSNHRHFIRIHFSDILSNLSNSDSDFYLFVNGYWRVDVKPSEQPRLASPFFKDVVNVSDGSGLLNISIGTKEANKDAGFLNGLEMMEVLSKSGSDYSNRSSSRVHIITGCAVAAAAASALVFSLLFMVFLKRRRSKKTKPEVEGTVWSPLPLHRGGSSDNRPISQYHNSPLRNLHLGLTIPFTDILSATNNFDEQLLIGKGGFGYVYKAILPDGTKAAIKRGKTGSGQGILEFQTEIQVLSRIRHRHLVSLTGYCEENSEMILVYEFMEKGTLKEHLYGSNLPSLTWKQRLEICIGAARGLDYLHSSGSEGAIIHRDVKSTNILLDEHNIAKVADFGLSKIHNQDESNISINIKGTFGYLDPEYLQTHKLTEKSDVYAFGVVLLEVLFARPAIDPYLPHEEVNLSEWVMFCKSKGTIDEILDPSLIGQIETNSLKKFMEIAEKCLKEYGDERPSMRDVIWDLEYVLQLQMMTNRREAHEEDSTAINSGGSLVAPRLMVSDSFSTNSIFQNGDESKNRFGFTDSSETRVFSQLKISDAR

SEQ ID NO: 205 - DNA, 2683 bp, Arabidopsis thaliana (mouse-ear cress)
  CDS (116)..(2563)
tcttatcattatcttctccgaatatagactctgtttccttcaaaattgtccacaataatacgaattcgttatacccttttctccaaattacgatattctctgttcttcgttggctatgataaacctcaagctattcttagagctaaagttatgttttttaataactttactctgttcttcacacatctcctctgtttctgacactttcttcatcaactgtggatctccgacgaatgtaacagtcaacaatagaaccttcgtctccgacaacaatcttgttcaaggattctctgtcggaaccaccgattcgaattcaggtgatgaatcgactctgtttcagaccgcaagagtattctccgatgaatcatcatcaacttacagattcccgatcgaggaacacggttggttcttgattcgtatttactttttaccattagtctctgcttctcaagatttaaccacagctagattctcagtctcggctcagaatttcactctgatcagagaatataaaccctcaacgacttctgttgttagagaatacattttaaacgttaccacagatagtctcttgcttcagtttctccctagaactggttctgtttctttcatcaatgctttggaagttttgagacttccagagactttgatacctgaagatgcaaaactcattggtacacagaaggatcttaagctcagtagtcatgcgatggagactgtttctcgtgtaaacatggggaatcttagtgtgagtcgtgatcaagataagctgtggaggcaatgggattctgattctgcttataaagctcacttcggtacaccggttatgaacctcaaagcggttaacttcagtgctggtggaataactgatgacattgcaccagtttacgtctatggaaccgccacgaggttaaactctgatcttgatcctaatactaacgccaatcttacttggacattcaaagtcgagcctggtttcgattactttgttcggtttcacttttgtaacataatagtggatccttttggattcgagcgtcagatacgttttgacatttttgtgaactcagagaaagttagaaccattgatatgacagaggttttaaatggaacttttggggctccttttttcgttgatgcagtgatgcgtaaagcgaaaagccgtgaagggttcttgaatttatctattggtttagttatggatgtttcttcgtaccctgtttcttttattaacggatttgagatttcgaagctaagcaatgataagcggagtcttgatgcttttgatgccattttacctgatggttcttcgagtaacaagagttcgaatacgagtgtcggattgatagctggtttgtctgcagctttgtgtgttgctttagtgtttggtgtggttgtgtcttggtggtgcattaggaaaagaagaagaagaaatagacaaatgcagactgttcattctagaggagatgatcatcagattaagaagaatgaaacaggtgagagcttaatcttttcgagctcaaagatcggttatcgataccctttggctctaatcaaggaagcaactgatgattttgatgaaagcttagtgattggggttggtgggtttggtaaagtttacaaaggagtcttgagagacaaaaccgaagtagctgtgaaacgtggtgctcctcaatctcgacaaggtctggcggagtttaagacagaggttgaaatgcttactcagttcagacacagacatttggtttctttaatcggatattgcgatgaaaacagtgaaatgatcattgtctatgaatatatggagaagggaacgcttaaggaccatttgtatgacttggatgataagccgaggttgagttggagacagaggcttgagatatgcgttggtgcagctagagggcttcattatctccacacaggttccacaagagcaatcatacaccgcgatgtgaaatctgctaacattctattggatgataattttatggctaaagttgcagattttggattgtctaagacaggtcctgatcttgatcaaacacatgtgagtaccgcggtcaaaggaagctttggatatcttgatccagagtatctaacaagacaacaattaactgagaaatctgatgtttactcttttggtgtggtgatgcttgaagtagtatgtggtagaccagtcattgatccatcactaccgagagagaaagtgaatttgatcgaatgggcgatgaagttggtgaagaaagggaaattggaagatatcatagacccatttcttgtaggaaaagtaaagcttgaagaggtgaaaaagtactgtgaggtaacagagaagtgtttgtcccaaaacggaattgagaggccagcaatgggagatttgttgtggaacctagagttcatgcttcaggtgcaagcaaaagatgagaaagcagcaatggtggatgataagccagaggcgagtgtcgttggctcgaccatgcagtttagtgtgaatggagtgggagatattgcaggggtctcaatgagcaaagttttcgcacaaatggttagagaagaaacgagataaatatttgatcaaaagaagagtatcttcatcactattgtgttgtttgtacaggagggatcacaatactgttttatacattgatattgtttatcaattgatatataatttaagcttctttgt

SEQ ID NO: 206 - protein, 815 aa, Arabidopsis thaliana (mouse-ear cress)
MINLKLFLELKLCFLITLLCSSHISSVSDTFFINCGSPTNVTVNNRTFVSDNNLVQGFSVGTTDSNSGDESTLFQTARVFSDESSSTYRFPIEEHGWFLIRIYFLPLVSASQDLTTARFSVSAQNFTLIREYKPSTTSVVREYILNVTTDSLLLQFLPRTGSVSFINALEVLRLPETLIPEDAKLIGTQKDLKLSSHAMETVSRVNMGNLSVSRDQDKLWRQWDSDSAYKAHFGTPVMNLKAVNFSAGGITDDIAPVYVYGTATRLNSDLDPNTNANLTWTFKVEPGFDYFVRFHFCNIIVDPFGFERQIRFDIFVNSEKVRTIDMTEVLNGTFGAPFFVDAVMRKAKSREGFLNLSIGLVMDVSSYPVSFINGFEISKLSNDKRSLDAFDAILPDGSSSNKSSNTSVGLIAGLSAALCVALVFGVVVSWWCIRKRRRRNRQMQTVHSRGDDHQIKKNETGESLIFSSSKIGYRYPLALIKEATDDFDESLVIGVGGFGKVYKGVLRDKTEVAVKRGAPQSRQGLAEFKTEVEMLTQFRHRHLVSLIGYCDENSEMIIVYEYMEKGTLKDHLYDLDDKPRLSWRQRLEICVGAARGLHYLHTGSTRAIIHRDVKSANILLDDNFMAKVADFGLSKTGPDLDQTHVSTAVKGSFGYLDPEYLTRQQLTEKSDVYSFGVVMLEVVCGRPVIDPSLPREKVNLIEWAMKLVKKGKLEDIIDPFLVGKVKLEEVKKYCEVTEKCLSQNGIERPAMGDLLWNLEFMLQVQAKDEKAAMVDDKPEASVVGSTMQFSVNGVGDIAGVSMSKVFAQMVREETR

SEQ ID NO: 207 - DNA, 2637 bp, Arabidopsis thaliana (mouse-ear cress)
  CDS (1)..(2637)
atggagataagaaagaaaccaaacatattcacggttctcgtcattgatttttcttcaaagccttccatggctctccttctggctattctccttttcctctcaggcccttctgcatctgcggtagctgcagctgctgtgggacctgctactggttttaaaccggcagatgatattctcattgattgtggaagcaaatcgtcatcaaaaacccctgatggaagagtctttaagagtgaccaagaaacaatccaatacatagaagccaaggaagatattcaggtctcagccccgccttcagacaaggtcgcatctcctatctacctaactgcaaggatcttccgtgaggaagccacctacaaattccatttgactcgacctggttggcattgggttcgcctgcatttcttggccttccctaatgacaagttcgatctccaacaagcaaccttttccgttttaacggagaaatatgtgctgcttcataacttcaaaataagtaacaacaacaatgatagtcaagctgctgttcagaaggagtatctcgtcaacatgacagatgctcaattcgccctcaggttcagacctatgaaaagctctgcagcgttcatcaacgctatcgaagtcgtgtcagctccagacgaactgatctctgattctggcactgcccttttccctgtcattgggttctcgggtctgtctgactacgcttaccagtctgtttatagagtcaatgtcggcggtcccttgatcatgcctcagaatgatacattaggaagaacctggatacccgataaggaattcttgaaagatgagaacttggcaaaggacgttaaaacaaccccttcggcaatcaagtacccaccggaagttacacctttgattgctccacagacggtttatgcaacagctgtagaaatggctaattctctcaccatagaccctaattttaacgtctcctggaatttcccctccaacccatcgtttaactaccttatccggcttcatttctgtgatatcgttagcaagtctctcaatgacctgtactttaatgtgtacattaacgggaaaactgccatttctggactggatttgtccactgtcgctgggaatctagctgctccttactacaaagacatcgttgtgaacgcaacacttatgggccctgagctccaagtccagattggtcccatgggagaagatacagggaccaaaaacgcgatcttgaacggtgttgaggttctgaagatgagcaattccgtgaacagccttgatggagagtttggagtggatggtagaaccactggcatggggaagcatggtatggtagcaaccgcggggtttgtgatgatgtttggagctttcattggtctgggagccatggtttacaagtggaagaagaggccacaagattggcagaagagaaatagtttctcctcttggttgctaccaatacatgctggtgatagcactttcatgacaagcaaaggtggttctcagaaatccaacttctacaactcaacacttggtctcggccgctatttctccctttcagagcttcaagaagccacaaagaactttgaagcatcccagattatcggtgttggaggattcggtaacgtctacattggaaccctcgacgatggaaccaaagtcgctgtcaaaagaggtaatccacagtctgaacaaggaatcactgagtttcagacagagatccagatgctttctaagctcagacacagacacttggtctccttgattggttactgtgacgagaactctgagatgatcttagtctatgagttcatgtccaatggtccattcagggaccacttgtatggaaagaaccttgctcctctaacctggaaacaaagactcgagatatgtatcggatctgcacgtgggcttcactacttacacacaggaacagctcaggggattatccaccgtgatgtcaaatccaccaacattcttctcgatgaagctttagttgcaaaagtcgctgactttggtctttctaaagatgtagcttttggacaaaaccatgtcagcacggccgtgaaaggaagtttcgggtacttagacccggagtactttagaagacaacaacttaccgacaaatccgatgtttattcctttggtgtcgttcttctagaagctctgtgcgcaagaccagccatcaatcctcagctaccaagagagcaggttaacttagctgaatgggcgatgcaatggaaacgaaaaggacttcttgaaaagatcattgatcctcatttggctggaacgattaatcctgaatcgatgaagaagtttgctgaagctgcagagaagtgtttagaagactacggtgtcgataggccaacaatgggagatgttctgtggaacttggagtatgctcttcagcttcaagaggcattcactcagggcaaagcagaagagaccgagaacgctaagcctgatgtggtgacacctggctcggtgcctgtgtctgatccatctccgatcactccctcagtcaccaccaacgaagcggctactgttccggttcctgctaaggtggaagagaacagtggcacggccgtggatgaacactctggaacagccatgtttactcagtttgctaaccttaacggaagataa

SEQ ID NO: 208 - protein, 878 aa, Arabidopsis thaliana (mouse-ear cress)
MEIRKKPNIFTVLVIDFSSKPSMALLLAILLFLSGPSASAVAAAAVGPATGFKPADDILIDCGSKSSSKTPDGRVFKSDQETIQYIEAKEDIQVSAPPSDKVASPIYLTARIFREEATYKFHLTRPGWHWVRLHFLAFPNDKFDLQQATFSVLTEKYVLLHNFKISNNNNDSQAAVQKEYLVNMTDAQFALRFRPMKSSAAFINAIEVVSAPDELISDSGTALFPVIGFSGLSDYAYQSVYRVNVGGPLIMPQNDTLGRTWIPDKEFLKDENLAKDVKTTPSAIKYPPEVTPLIAPQTVYATAVEMANSLTIDPNFNVSWNFPSNPSFNYLIRLHFCDIVSKSLNDLYFNVYINGKTAISGLDLSTVAGNLAAPYYKDIVVNATLMGPELQVQIGPMGEDTGTKNAILNGVEVLKMSNSVNSLDGEFGVDGRTTGMGKHGMVATAGFVMMFGAFIGLGAMVYKWKKRPQDWQKRNSFSSWLLPIHAGDSTFMTSKGGSQKSNFYNSTLGLGRYFSLSELQEATKNFEASQIIGVGGFGNVYIGTLDDGTKVAVKRGNPQSEQGITEFQTEIQMLSKLRHRHLVSLIGYCDENSEMILVYEFMSNGPFRDHLYGKNLAPLTWKQRLEICIGSARGLHYLHTGTAQGIIHRDVKSTNILLDEALVAKVADFGLSKDVAFGQNHVSTAVKGSFGYLDPEYFRRQQLTDKSDVYSFGVVLLEALCARPAINPQLPREQVNLAEWAMQWKRKGLLEKIIDPHLAGTINPESMKKFAEAAEKCLEDYGVDRPTMGDVLWNLEYALQLQEAFTQGKAEETENAKPDVVTPGSVPVSDPSPITPSVTTNEAATVPVPAKVEENSGTAVDEHSGTAMFTQFANLNGR

SEQ ID NO: 209 - DNA, 2888 bp, Catharanthus roseus (Madagascar periwinkle)
  CDS (178)..(2589)
atactagccttttctttttctctgtctttgtcaagctatctctctctattcctcacataaggtttccaataaagaacttgaatttcttaacactccattaattctcaggtgaattccttctttacttctcttctacaccattttcttcattgtccctcttgatttttcagttccataatgagaattttgattcaagaaatgcttattagaacattattctttttctatttgattatttcgtcattagaatttactcctgagaataattatttgataaattgtggttcatttaatgatacctccattgatgataggatttttttggccgataatttgaattctactgttctttcaaccccagaaacaatttttgccaattcttcgaactcaaattctgttctagatttgtataaatctgctagaatttttaatgggagctctcagtacaatttttcaatcaataaaaaaggttggcattggattagattacatttctttccatttccaatttccaatgaaaaattcaatttaagcagtgctaaattctctgtttttgcccaaaattttacccttttgaaagattttcaacccttaaacaatgttcctgttgtgaaagaattttcattgaatgtaaattccaacaatttattgttgaaatttaccccttcaagaaattcattagcatttttaaatggtttagaagtcatttcacttcctgatgaactaatcccattttctattggaaaccaaaatcttgaaaaaaatgctttagaaactgtagttagggttaatatgggtaatgtaacagtatcctctaaggatgatccgttggggcgaatttggttgtctgattataactatctatcaaatgtaaatcttgttgtttttgtgtcgaatattcatttagttaattacactaagggcgaagaaaaagttagtgaaaatataggtccctcttctgtttacgggactggtactaagttacattcagtatttgatccgaatactcaaataaacgcgacatggttgtttaatgttgattcgggttttggatatttcatcagatttcatttttgtaatcttttaaatccaattcctaataataatttcttcttcaatgttttccttaactctgaatttgttgttaaggatcttaaccttagtacttctggtgctcctatgtacaaggatgtagttgttgttactaatgttgttcctcagattagaataagtgttggtccttcaaatgtccgaaattcttatccagatgggattctaaatggtcttgaaatcatgaaaattagtacttctgatggtagtcttgctgctgttgatgctgattttccgtcttcaagttcatcttcaaagttaaaagtttggatcatagttagtctagctattgggatatcgttgattctcgtggttttcacagttgtttttctattcagaagaagaaaaaggcacgttatgatccactcaacaccggatcatttgacagaagaagatgattcaaattcatctatcttttcgcgatcaaagataggttatcgtttccctcttgcagttgttcaagaagctaccgataactttagtgaaaatcgggttattggcattggtggatttggcaaagtttacaagggagttttcaaagatggtacaaaagtagctgtgaaaagagggatttcttgttctagttctaaacaaggcctttctgagtttagaactgaagttgaattattgtctcaatttcgccatcggcatcttgtttccctgattggatattgtgatgaaaagaatgaaatgatcattatttatgagtttatggagaatggtacccttagagatcatctttatggatcagataagccgaaactgaattggcgaaaaagggtggaaatttgcattggttctgctaaaggacttcattatctgcatactggaacaatgaagcgaattattcatcgcgatgtgaagtcagcaaacatacttttagatgagaatctaatggcaaaagttgcagattttggagtatcgaaaacaggtccagatcatttcgatcaaacacatgttagtacagcagtaaaaggaagttttggttatcttgatcccgagtatttaacaatgcagaaattgactgagaaatcagacgtttattcttttggagtagttatgcttgaaatattgacaggaaggccagttatcgatccatcaaaaccgagagaaatggtaaacttggttgaatgggcaatgaaatgttcaagaaaaggcgaagaaattgttgattctgatattgtaaatgaagttaggcctgaatcattgatcaagtttcaagaaactgctgagaaatgcttggcagaaagaggcgttgatcggcctacaatgggagatgttttgtggaacttggaatgtgcacttcaactacaaggaaaacagaaagaaaatgaacagccagaagagatgagagacgtttcggccacagagattagtttgggaagtatggctgatcttgctgctgtatctatgagtaaagtgttttccgaattggtaaaagctcaaggtacacgttctgaatttggatcggctccatgagtcctgttgatgttttgaatttggacttgttgtatttcgtatttgcaagaccagaccaccccagccgatggactcatcatgcacataagcagcaaaaggcagaatgaaccaagttttgattcgctgtgtccatttcatcatttttaactttgaatttttttcctcatatctttagctagatgagttagtttatttatgaaggttcaattatatgaattacgtattaactatatatgtatatatataccctcaagttttgaacttttcatgcttattatatcttattgtattttcagata

SEQ ID NO: 210 - protein, 803 aa, Catharanthus roseus (Madagascar periwinkle)
MRILIQEMLIRTLFFFYLIISSLEFTPENNYLINCGSFNDTSIDDRIFLADNLNSTVLSTPETIFANSSNSNSVLDLYKSARIFNGSSQYNFSINKKGWHWIRLHFFPFPISNEKFNLSSAKFSVFAQNFTLLKDFQPLNNVPVVKEFSLNVNSNNLLLKFTPSRNSLAFLNGLEVISLPDELIPFSIGNQNLEKNALETVVRVNMGNVTVSSKDDPLGRIWLSDYNYLSNVNLVVFVSNIHLVNYTKGEEKVSENIGPSSVYGTGTKLHSVFDPNTQINATWLFNVDSGFGYFIRFHFCNLLNPIPNNNFFFNVFLNSEFVVKDLNLSTSGAPMYKDVVVVTNVVPQIRISVGPSNVRNSYPDGILNGLEIMKISTSDGSLAAVDADFPSSSSSSKLKVWIIVSLAIGISLILVVFTVVFLFRRRKRHVMIHSTPDHLTEEDDSNSSIFSRSKIGYRFPLAVVQEATDNFSENRVIGIGGFGKVYKGVFKDGTKVAVKRGISCSSSKQGLSEFRTEVELLSQFRHRHLVSLIGYCDEKNEMIIIYEFMENGTLRDHLYGSDKPKLNWRKRVEICIGSAKGLHYLHTGTMKRIIHRDVKSANILLDENLMAKVADFGVSKTGPDHFDQTHVSTAVKGSFGYLDPEYLTMQKLTEKSDVYSFGVVMLEILTGRPVIDPSKPREMVNLVEWAMKCSRKGEEIVDSDIVNEVRPESLIKFQETAEKCLAERGVDRPTMGDVLWNLECALQLQGKQKENEQPEEMRDVSATEISLGSMADLAAVSMSKVFSELVKAQGTRSEFGSAP

SEQ ID NO: 211 - DNA, 3103 bp, Arabidopsis thaliana (mouse-ear cress)
  CDS (123)..(2810)
tctctctcccccaaaatatctctgtcttctccaaaaactctctccgatttcatcgcttagggtttcttccccgattcttcagatctgagaagaagatcttcccggagaagtgctcttgatcgatgaagatcacagagggacgattccgtctctctcttcttcttcttcttcttctcatatctgcagcaactttaatctcagctgctgattactctccaacagagaaaatcctattgaattgcggtggtggtgcttctaatctaaccgacacagataaccgtatatggatctccgatgtcaaatcaaaattcttatcatcttcctctgaagactctaaaacatcaccagcgttaacacaagatccttccgttcccgaagttccttacatgacggcgagagttttccgatctcctttcacttacactttccctgtagcatcaggtcgtaaattcgtgcgtctctacttctacccaaactcgtacgacggtctcaacgctaccaactcgttattctccgtctcctttggtccttacactcttctcaagaatttcagtgcttctcagacggcggaggcgttgacttacgctttcatcatcaaagagtttgttgtcaacgttgaaggtggaacgttgaacatgacgtttacaccggaatcagctccgtctaatgcgtatgcgtttgttaatgggattgaggttacttcaatgcctgatatgtatagtagtactgatgggactttgactatggttggatcatctggctctgttactattgataacagtactgctcttgagaatgtgtataggctcaatgttggagggaatgatatctcgccttccgcggatacgggtttgtataggtcgtggtatgatgatcagccttatatatttggtgcaggacttggtattccagagactgctgatcccaacatgacgattaagtatcctacggggactcctacttatgttgctcctgtggatgtttattcaaccgcgaggtctatgggtccaacagctcagatcaatctcaactacaatcttacttggattttcagcattgactctggtttcacttaccttgttagacttcatttctgtgaggtttcttcgaatatcactaagatcaaccaacgggtgtttacaatctacctcaacaatcaaactgctgagcctgaagctgatgtgattgcttggactagttcaaacggggttccgtttcacaaggattacgtggtgaatcctccagagggaaatggacagcaagatttgtggcttgctcttcatcctaacccagttaacaagccggagtattatgattctcttcttaatggagtggagatattcaagatgaatacttctgatggtaatctggctggtaccaatcctatacctggtccacaggtgactgctgatccatctaaagtcctacgcccgactactaggaaatcgaaaagcaatacggctattattgcaggcgcagccagtggtgcagttgttctggcccttatcattgggttttgtgtgtttggtgcttaccgcagacgtaagcgtggtgattaccagcctgctagtgatgcaacatcagggtggcttccactatctctgtatggaaactcacattctgctggctcggcgaagacaaacacaacaggaagttatgcctcgtcccttccgtcaaatctttgccgtcacttctcgtttgctgagatcaaagctgccactaaaaactttgatgagtcccgggtgcttggtgttggtggtttcggcaaggtttacagaggagagattgatggcggaactacaaaggtagccatcaagagaggcaacccaatgtccgagcaaggtgtacatgagttccagactgagattgaaatgctttcaaagcttagacatcgtcatcttgtgtccttgattggatactgtgaagagaactgcgaaatgatcttagtctatgattacatggctcatggtacaatgagggagcatctctacaaaacccagaatccttctcttccatggaagcaacgtcttgagatatgcattggagcagcccgaggtttacactatctacacactggtgcaaaacacacaatcatccatagagatgtgaagacaacaaacattctattggatgagaaatgggtggccaaggtctctgattttggtctatcgaagactggtcctacactagaccacacacacgtaagcacagttgtgaaaggaagtttcggttatcttgacccagagtatttcagacggcagcaactgactgagaaatccgatgtctactcctttggcgttgttctattcgaagctctatgcgctcgtccagccttgaacccaacacttgcaaaggaacaagtgagcttagctgagtgggcaccatactgctacaagaaaggcatgctagatcaaatcgttgatccctacctcaagggcaagatcacaccagaatgcttcaaaaagtttgctgaaaccgcgatgaagtgtgttctagaccagggcattgagagaccatcaatgggagatgttctgtggaacttagaatttgcgttgcagctccaggaaagcgcagaagagaacggaaaaggagtatgcggtgacatggacatggatgagattaagtacgatgatggaaactgtaaaggaaagaacgacaagagttctgatgtgtatgaagggaatgtgacggactcgaggagcagtggaatagatatgagcatcggtggtaggagtttggccagcgaagattcagatggactcactccaagtgctgtgttttctcagatcatgaatccaaagggacgttagagaagtcttataacacggtacaacactactacctttctaaaccggctccatccaaaggagaccggttcgtttctcttttttatattttttttcctcttaactatttattattattctctttgctgttatttatttagaattttggatttgtgtatttgatgccacgatggagagtgtaaaaaataatgtatttttttttcttctttctacaaaaacattaaacatgaatcgcgtcaatgtactatttggtttgttatctataacgtttttggtaattgttgcatctttactct

SEQ ID NO: 212 - protein, 895 aa, Arabidopsis thaliana (mouse-ear cress)
MKITEGRFRLSLLLLLLLISAATLISAADYSPTEKILLNCGGGASNLTDTDNRIWISDVKSKFLSSSSEDSKTSPALTQDPSVPEVPYMTARVFRSPFTYTFPVASGRKFVRLYFYPNSYDGLNATNSLFSVSFGPYTLLKNFSASQTAEALTYAFIIKEFVVNVEGGTLNMTFTPESAPSNAYAFVNGIEVTSMPDMYSSTDGTLTMVGSSGSVTIDNSTALENVYRLNVGGNDISPSADTGLYRSWYDDQPYIFGAGLGIPETADPNMTIKYPTGTPTYVAPVDVYSTARSMGPTAQINLNYNLTWIFSIDSGFTYLVRLHFCEVSSNITKINQRVFTIYLNNQTAEPEADVIAWTSSNGVPFHKDYVVNPPEGNGQQDLWLALHPNPVNKPEYYDSLLNGVEIFKMNTSDGNLAGTNPIPGPQVTADPSKVLRPTTRKSKSNTAIIAGAASGAVVLALIIGFCVFGAYRRRKRGDYQPASDATSGWLPLSLYGNSHSAGSAKTNTTGSYASSLPSNLCRHFSFAEIKAATKNFDESRVLGVGGFGKVYRGEIDGGTTKVAIKRGNPMSEQGVHEFQTEIEMLSKLRHRHLVSLIGYCEENCEMILVYDYMAHGTMREHLYKTQNPSLPWKQRLEICIGAARGLHYLHTGAKHTIIHRDVKTTNILLDEKWVAKVSDFGLSKTGPTLDHTHVSTVVKGSFGYLDPEYFRRQQLTEKSDVYSFGVVLFEALCARPALNPTLAKEQVSLAEWAPYCYKKGMLDQIVDPYLKGKITPECFKKFAETAMKCVLDQGIERPSMGDVLWNLEFALQLQESAEENGKGVCGDMDMDEIKYDDGNCKGKNDKSSDVYEGNVTDSRSSGIDMSIGGRSLASEDSDGLTPSAVFSQIMNPKGR

SEQ ID NO: 213 - DNA, 2779 bp, Arabidopsis thaliana (mouse-ear cress)
  CDS (1)..(2493)
atgggtattgaaaagtttgaaactttcatcttgatttcaacgatttcgatcttgctttgtatctgccatggattcacacctgtggataattacttgatcaactgtggatcaccaaccaatggaacactaatgggtcgaatctttctgtctgataagctctcttcgaagttacttacttcgtccaaagagattctcgcaagcgtaggcggtaactctggctcagacatttaccacacggcaagagtcttcaccgaagtctctagctacaaattctcggtcactcgtggtcgtcattgggttcgtctctatttcaatccttttgactaccaaaacttcaaaatgggttcagctaaattcgcggtttcttcacaaagtcatgtccttttgagtgatttcactgttacgagttcaaaagttgtcaaagagtactctttgaacgtgactactaatgatttagtgctcacctttactccctctagtggttcgtttgcgtttgtgaatgctatcgaggttatatcgattccagatactttgattactggtagtccaaggtttgtaggcaaccctgcgcagtttccggatatgtcaatgcaaggtcttgaaaccattcatagagtcaacatgggtggtccgcttgttgcgtctaacaacgatacgttaacgagaacttgggtgcctgactcggagtttctgcttgagaagaatttagctaagagtatgtctaagttttcaactgttaactttgttccaggttatgcaacagaggactctgctccaagaactgtctatggtagttgtactgagatgaattccgctgataacccgaatagcattttcaatgtgacttgggagttcgatgttgacccgggttttcagtactatttccgctttcatttctgcgatatcgttagcttgtcgttaaaccagctatatttcaatctttatgttgactcaatggttgctgctacggatattgatcttagcactcttgtggataacactttggctggtgcatattcgatggactttgtcacgcagacgccaaagggtagtaataaagtccgtgtgagcatcggtccgtcgactgttcacaccgattatccaaacgcgattgtgaatggattggagattatgaagatgaataactctaagggtcagttaagcactgggacatttgtgcctggtagtagttcaagcagtaagagtaatctcgggttgattgtaggttcagccattggttcgttgctcgcggtagtcttcttgggaagttgctttgtgttgtataagaagcggaaacgtggccaagacggtcattcaaagacttggatgccgttttcgataaatggaacttcgatgggaagcaaatactccaatggaactacgcttacaagtataactaccaatgccaattaccgtattccctttgcagcggttaaagacgctacaaataactttgacgagagccgcaacatcggtgtaggcggttttggtaaagtctacaaaggagagcttaatgacggtacaaaggtagctgtgaaaagagggaacccaaaatctcagcaagggcttgcggaattcaggacagaaatcgagatgttatctcagtttcgtcaccgccatttggtttctctgatcggttattgtgacgagaacaatgagatgatactaatttacgagtatatggagaatggaacggtaaagagtcatctttatggctcaggtctacctagcttgacttggaaacaacggcttgagatctgcattggtgcagctagaggcttgcattaccttcacacgggtgactcgaaaccggtcattcacagagacgtgaaatctgcaaacatattgcttgacgagaacttcatggctaaagttgcagactttggactgtccaagactggacccgagcttgatcagactcatgtaagtactgctgtcaaaggaagttttggttatcttgaccccgagtacttcagaaggcaacagctcacagataaatccgatgtttattccttcggagttgttctcttcgaggttttatgtgctagacctgttatagacccaacacttccaagagagatggtgaatcttgcagaatgggctatgaaatggcagaagaaagggcaactggatcagatcatcgaccagtcgcttcgcggaaatatcagacccgattcgttaaggaaatttgcggaaacaggtgagaaatgtttagcggattatggagttgataggccatctatgggagatgtgttgtggaatcttgaatacgctctgcagcttcaagaagcagtcattgatggtgaaccagaagataatagcacgaatatgattggtgaattacctccgcagatcaataatttcagtcagggagacactagtgttaacgttccgggcacagcggggcgattcgaggaatctagtattgatgatctctctggcgtttccatgagtaaagtattctcacaactggtgaaatctgaaggaagatagtgaaagatttgagcaatgcagtgccaagaaaagccaaagatctgatctttttgatagaaacagagcaagcaaagtatgtaaccaggaaaaaagcatcaggttattttcagataggatctttgtctttgcttgatctgtttctactgcagatttttcatcagtgattaaacggttactttgaaaatttaccttattttgttcctctctcccttatcctgagtttgtattttattgatgttcattttgaaattgtctgaaatttgtttgttctttttactatatggat

SEQ ID NO: 214 - protein, 830 aa, Arabidopsis thaliana (mouse-ear cress)
MGIEKFETFILISTISILLCICHGFTPVDNYLINCGSPTNGTLMGRIFLSDKLSSKLLTSSKEILASVGGNSGSDIYHTARVFTEVSSYKFSVTRGRHWVRLYFNPFDYQNFKMGSAKFAVSSQSHVLLSDFTVTSSKVVKEYSLNVTTNDLVLTFTPSSGSFAFVNAIEVISIPDTLITGSPRFVGNPAQFPDMSMQGLETIHRVNMGGPLVASNNDTLTRTWVPDSEFLLEKNLAKSMSKFSTVNFVPGYATEDSAPRTVYGSCTEMNSADNPNSIFNVTWEFDVDPGFQYYFRFHFCDIVSLSLNQLYFNLYVDSMVAATDIDLSTLVDNTLAGAYSMDFVTQTPKGSNKVRVSIGPSTVHTDYPNAIVNGLEIMKMNNSKGQLSTGTFVPGSSSSSKSNLGLIVGSAIGSLLAVVFLGSCFVLYKKRKRGQDGHSKTWMPFSINGTSMGSKYSNGTTLTSITTNANYRIPFAAVKDATNNFDESRNIGVGGFGKVYKGELNDGTKVAVKRGNPKSQQGLAEFRTEIEMLSQFRHRHLVSLIGYCDENNEMILIYEYMENGTVKSHLYGSGLPSLTWKQRLEICIGAARGLHYLHTGDSKPVIHRDVKSANILLDENFMAKVADFGLSKTGPELDQTHVSTAVKGSFGYLDPEYFRRQQLTDKSDVYSFGVVLFEVLCARPVIDPTLPREMVNLAEWAMKWQKKGQLDQIIDQSLRGNIRPDSLRKFAETGEKCLADYGVDRPSMGDVLWNLEYALQLQEAVIDGEPEDNSTNMIGELPPQINNFSQGDTSVNVPGTAGRFEESSIDDLSGVSMSKVFSQLVKSEGR

SEQ ID NO: 215 - DNA, 1092 bp, Zea mays
  CDS (1)..(981)
atgaggctacttgcgctggcagttgcaagcatcgtgcttgagcaaaatgcgcctcctgctccaccccctgagcatgtggtcaagatgcacccttcgcctccgccagcatatgccaatcgtcctccacagccgccagtgccaccaccaccagcgatgctaaatagtagtggaggatctggttctaattactctggcggcgagatcctacctccaccatcccctggagctgttcttggcttctcgaagagcacattcacctacgaagagctgttgagggctactgatggattctcggatgctaatctccttggacaaggtggttttggctatgttcacagaggattgctgcctaatggcaaagagattgctgtaaaacaattgaaactgggaagtggccagggagagcgtgagttccaggctgaggttgagattatcagccgagtacatcacaaacaccttgtgtctttggttggctattgcatttctggaggcaagaggctgcttgtctatgagtttgtccccaataacacattggaattccacttacatgcgaaaggtcgaccaacaatggagtggcctgctagattaaagatcagtttgggtgctgccaagggtttagcttatcttcatgaagactgccatccaaagatcatccatcgtgacataaaggcatctaacattcttcttgacttccaatttgaagctaaggttgctgactttggacttgcaaagttcactactgataacaacacccatgtttcgacaagagtaatgggcacctttgggtatttggcacctgagtatgcatcttctggcaagctcacagaaaaatccgatgtattttccttcggagtcatgcttcttgagcttattactgggcggcgaccaattgacacaacccaattggcactgcttgctataagcacatatgtacttccatttgcatgttgtataatactaataccaattgcaaaattatagttattttttctacccttgttagttaataagcatatttctggtcaataggttgtattcttattcttgtaaccgtgttaattaatgttatatacttgtagtctcggaaaaaaa

SEQ ID NO: 216 - protein, 326 aa, Zea mays
MRLLALAVASIVLEQNAPPAPPPEHVVKMHPSPPPAYANRPPQPPVPPPPAMLNSSGGSGSNYSGGEILPPPSPGAVLGFSKSTFTYEELLRATDGFSDANLLGQGGFGYVHRGLLPNGKEIAVKQLKLGSGQGEREFQAEVEIISRVHHKHLVSLVGYCISGGKRLLVYEFVPNNTLEFHLHAKGRPTMEWPARLKISLGAAKGLAYLHEDCHPKIIHRDIKASNILLDFQFEAKVADFGLAKFTTDNNTHVSTRVMGTFGYLAPEYASSGKLTEKSDVFSFGVMLLELITGRRPIDTTQLALLAISTYVLPFACCIILIPIAKL

SEQ ID NO: 217 - DNA, 2387 bp, Zea mays
  CDS (295)..(1878)
gtctccttcctctattcgtgttgtccgttcgctgccgccgtcgcctggttcgcatcgcatacagcgcctcagtccagatcgatcctccctcttcccagatcgggtctagttggacggcagcagccgccgccgcggcatctgtcatattcacgccgcgtgtgctctctctttctgtctccctctctatctgcgacgactgggtgtgataccgcagccgccgccctacgctgggttcccgagccttcgccgatctcttctccggcgaagagcgcccaccagatccgccgcgcatcgatgtctcctttggctcttctccaagctctcatcttcatcctgtgctgctcgcctctggcttctgcttcctcgtcggagctaacccttgcaggagctgcttgtggagatgatcagcttgtcatcttcgatgcttctgatggcctccttaacctgtcggtcaatggggttctgatgcaagatcgcgtttttgcctgccagaagctcggcttctactttggcagtggatgcctccgctgcagcaacctttcagatgcgtggaggagtgccgtaaagcagtactgtggtgaagggagcgaaaagagccatgcaactttacatcaagatgtgccaaggaagctcttgaggtggtccacagaaaatagctcaaggaatgcatgtgaaaggtctgggttgaatgaaaataatcaggacattggtgattcttcagaaaagcaggagcatctcctggctgtgccaggtgtgattctcttatgctgtggccttatgttaccatgctttcatgctgaaaggaaagaagtcagcaggcatgacaatgcaaccattcagcgcaacgcacttgaatcagtttcatcctatgaaggaagcatgtcatctgagaaagtcccaccaactccacatcgaatacctccaagtccctctagatttgcgccgtctccacagatagctagagttggatctgtcaacttaagcatccagcagatcctcagggcaactcagaacttctcaccttcatttaagttaggtgaaggaggatttgggatggtctacagggctgtattgccagatggcaatgttgttgcggtcaagagagctaaaaaggatcagtttgcaggtcctagggatgagttcagcaatgaagtagacttgcttgctaagatagaccaccgaaatttggtgaggttactgggttttactgataaaggaaatgagcgcattatcatcactgagtatgttccaaatggtactcttagagaacatctagatggtcaacatggcagagtcctagattttaatcagcgtctagaaattgcaattgacgtggctcatgcacttacttatcttcatctgtatgcagagaagactataattcatcgtgatgtgaagtcatcaaacatcctgctgacagatagctatcgggccaaggtgtctgactttgggtttgcaagaagtggccctagtgacacggagaagacacacatatcaacgaaagtgaaaggcacagctgggtacctggaccccgaatacttgaggacataccagctaactccaaagagtgatgtcttctcatttggcatattgcttgtagaaattctttctgctcgcagacccgtagagctgaagcgaacccctgaagagaggatcacaatcagatggactttcaaaaaattcaacgaaggcaacacgagagagatactggacccattgctggaagatcacgtggacgacgaggtgcttgaaaagctccttagcctggctttccaatgcgctgctccgacacgggacgaccggccgaccatgaaggaagttggggagcagctgtgggagataaggaaagagtacggaaagagtgttaggaaggtgtgaagatcatggaaaacatttccctgtttctcaagactttccctggaccaaggggactaaggggggtgtttggttttatagggattaaattttagttcttccattttattctatttaagtccctaaattaccaaacacggaaatcaaaactttattttagttttagtatttggtaattcagagacttgaatggaataaaatggatagactaaaaataagttcctagaaatcaaacaccctctaagcatgcgaagtatttgtgcccattggataaacacctgatcatctatgtttcttggaagatgtgacctgaagaaatgtacagtgcgataacaccgccatcagtttgtgctttcttgtctcagtttgcagtgcactccctctatggagaatgtatattttggagttctcgcatttcttgattctgttgatatggtattctgatggatgtacccgcatacattactgcaaacggtctgaaataatatacgaagggaaattgtttgtattgg

SEQ ID NO: 218 - protein, 527 aa, Zea mays
MSPLALLQALIFILCCSPLASASSSELTLAGAACGDDQLVIFDASDGLLNLSVNGVLMQDRVFACQKLGFYFGSGCLRCSNLSDAWRSAVKQYCGEGSEKSHATLHQDVPRKLLRWSTENSSRNACERSGLNENNQDIGDSSEKQEHLLAVPGVILLCCGLMLPCFHAERKEVSRHDNATIQRNALESVSSYEGSMSSEKVPPTPHRIPPSPSRFAPSPQIARVGSVNLSIQQILRATQNFSPSFKLGEGGFGMVYRAVLPDGNVVAVKRAKKDQFAGPRDEFSNEVDLLAKIDHRNLVRLLGFTDKGNERIIITEYVPNGTLREHLDGQHGRVLDFNQRLEIAIDVAHALTYLHLYAEKTIIHRDVKSSNILLTDSYRAKVSDFGFARSGPSDTEKTHISTKVKGTAGYLDPEYLRTYQLTPKSDVFSFGILLVEILSARRPVELKRTPEERITIRWTFKKFNEGNTREILDPLLEDHVDDEVLEKLLSLAFQCAAPTRDDRPTMKEVGEQLWEIRKEYGKSVRKV

SEQ ID NO: 219 - DNA, 3037 bp, Zea mays
  CDS (172)..(2922)
ttccaggttttctccaaccatgtccaccaacacactgatctagtactaggactagtactagatcgatcctgcctgcctgcctgcttgtaacagcaacagcagcagaagtggcgcactgtgctttgcggtggcggaggctgcgagagaggaggaacttgcaagccgacttccatggctgccgccttctccgccgctatcctcttccacctgctgctgctcctcttctcgccgtccgctgcgcagcctggtttcattagcttggactgcgggggagctcgtgatcacacggatgccattgggatccagtggacctctgatgccagcttcgtctctggcggccaggccgcgcagctgctggtccagaatggcctgcagcagacccagcagcagctgaccaccgtgcgctacttccccgcggacaacaggaagcactgctacaccatgaacgtcaggaacaggacgcgctaccttgtcagggccactttcctctacggcaacttcgataacagcaacgtctacccgaagttcgatatctccctcggagcgtctccctggtccaccatcgtcgtcgacgacgccaccacccccgtcgttgaggaagccatcatcttggctgctgctcccacgctcagtgtatgtctctccaatgccagcacgggacagcccttcatctctactctggagcttcgacagtttaacggttcgctctactacaccactgacgagacacgcttctttcttggactgtctgcgaggataaattttggcgcaggaagcaatgattcagtgagatatcctgatgatccatttgatagaatctgggaatctgattctgtgaggagagcaaattaccttgttgatgttgctccagggactgaaagaatatcaactacaaaacccatatttgtcggtaccaacgaagaaccacctgaaaaggtcatgcaaacagcagtagttggccaggatgggtcattgaactaccgccttgatttggaaggtttcccagcaaatgcttggggagtctcgtattttgcagaaattgaagatttggcaccaaatgaaacgaggaaatttaagttagaggtccctggcatgccagcactcagtaaaccaactgttgatgtggaggagaatgctcaagggaaataccgtttgtatgaaccaggctacacgaatttgtcacttccgtttgttttctcctttgggttcaggaagacgaatgattcttcaaaggggcctattttgaatgccctggagatttacaaatatgtccaaattactatgggatcacaggatgcaaatatcatggccagcatggtatcacgatatccacaggaaggttgggcacaagagggtggtgatccgtgcttaccagcatcatggtcctgggtgcaatgcagttcagaaacttctccaaggatattctcaatcacattgtctgggaagaacattaccggaagtatcccggtggaactgacaaagctatcagggttggttgagctaaggcttgatggtaattcattttctggccaaattcctgatttcagagaatgtgggaatttgcagtatatgcaccttgagaacaatcagttaactggtgaattgccatcttctttgggtgacctacctaacctgaaagagttgtatgttcaaaataacaagctgtctgggcaggttccaaaagcacttttcaagagaagcattattttgaacttctcaggtaacagtggccttcacatagtaagcaatggcattagccacaccataattgttatatgtctggtggttggagccgttgtcttactgggtgttgctattgggtgctatttcattacatgtaggagaaagaagaaatctcatgaagacactgttgtcattgcagcagcaccagctaaaaaacttggttcatattttagtgaagtggctacagaatcagcacacagattttctttatctgaaattgaaaatgctactggcaaatttgagagaagaattgggtctggaggctttggcatagtatactatggaaagttggctgatgggagagagattgcagtcaaacttctcacgaatgactcgtatcagggaatcagagaattcttgaatgaggtgacattgctttccagaatacatcatagacacctggttacattccttggttacagtcagcaagatggcaaaaacatactagtgtatgagttcatgcataatgggacactaaaagagcaccttcgtggagctgataatgaaaagataactagctggctgaagcgtcttgagattgcagaagattctgcgaaaggtatagagtatctccacacgggatgctccccaacaatcatccatagagacctgaagagcagtaacattctcctagacaagaacatgagagcaaaagtggcagactttgggctttcgaaacctgcagtggatgggtctcatgtgtcaagtatagttcgagggacagttggatacctggacccagagtactacatctcgcagcagctgacggagaagagcgacatctacagcttcggcgtgattttgctggagctcatctctgggcatgaacccatctcgaatgacaactttgggctcaactgccggaacattgttgcgtgggtaagagcccgatcgcacatcgagagcgggaacatccacgccatcattgatgagtcgttggacagaggctgctatgacctgcagtcggtgtggaagatcgcggaggtggccataatgtgtgtgaagcccaagggcgcccagaggcctcccatctcggaagtgctcaaggagatccaggacgccattgccatggagcgggtgctcgtgtccaattgcagcaacaggatgggttcaggtagcgtggagcagaatggaggagcatctttcgacgagctgctcatgcagccgggtctcagatgagatgagaacaacctactcgtaccttgagtccattgtatgtagtaattaatgtgtttactacattttttttgagaaacaaattaagtaatgctagcaaaggaaccagtatattatt

SEQ ID NO: 220 - protein, 916 aa, Zea mays
MAAAFSAAILFHLLLLLFSPSAAQPGFISLDCGGARDHTDAIGIQWTSDASFVSGGQAAQLLVQNGLQQTQQQLTTVRYFPADNRKHCYTMNVRNRTRYLVRATFLYGNFDNSNVYPKFDISLGASPWSTIVVDDATTPVVEEAIILAAAPTLSVCLSNASTGQPFISTLELRQFNGSLYYTTDETRFFLGLSARINFGAGSNDSVRYPDDPFDRIWESDSVRRANYLVDVAPGTERISTTKPIFVGTNEEPPEKVMQTAVVGQDGSLNYRLDLEGFPANAWGVSYFAEIEDLAPNETRKFKLEVPGMPALSKPTVDVEENAQGKYRLYEPGYTNLSLPFVFSFGFRKTNDSSKGPILNALEIYKYVQITMGSQDANIMASMVSRYPQEGWAQEGGDPCLPASWSWVQCSSETSPRIFSITLSGKNITGSIPVELTKLSGLVELRLDGNSFSGQIPDFRECGNLQYMHLENNQLTGELPSSLGDLPNLKELYVQNNKLSGQVPKALFKRSIILNFSGNSGLHIVSNGISHTIIVICLVVGAVVLLGVAIGCYFITCRRKKKSHEDTVVIAAAPAKKLGSYFSEVATESAHRFSLSEIENATGKFERRIGSGGFGIVYYGKLADGREIAVKLLTNDSYQGIREFLNEVTLLSRIHHRHLVTFLGYSQQDGKNILVYEFMHNGTLKEHLRGADNEKITSWLKRLEIAEDSAKGIEYLHTGCSPTIIHRDLKSSNILLDKNMRAKVADFGLSKPAVDGSHVSSIVRGTVGYLDPEYYISQQLTEKSDIYSFGVILLELISGHEPISNDNFGLNCRNIVAWVRARSHIESGNIHAIIDESLDRGCYDLQSVWKIAEVAIMCVKPKGAQRPPISEVLKEIQDAIAMERVLVSNCSNRMGSGSVEQNGGASFDELLMQPGLR

SEQ ID NO: 221 - DNA, 21 bp, Primer
atgtcgaagctgaggaaaaag

SEQ ID NO: 222 - DNA, 20 bp, Primer
ctaagccgaattgtgaagag

SEQ ID NO: 223 - protein, 879 aa, Unknown
  Consensus sequence
  MISC_FEATURE (2)..(877): xaa located in positions 2-31, 33-98, 100-117, 119-177,; 179, 181-191, 193-194, 196-236, 238, 240, 242-257, 259-263,; 265, 267-269, 271-303, 305-307, 309,311-328, 330-331,
  333-342, 344-345, ,347, 350-367, 369-436, 438, 440-584,; 586-592, 595-596, 598-603, 605, 610, 613, 615-618, 620-622,; 625, 628-631, 633-635,638-639, 642, 646-647, 650-651, 658,; 660, 662, 664, 666-667, 670, 675, 677-678,680, 682-683,
  686-698, 700, 702-703, 705, 711, 716, 721, 723-726,732,; 734-735,741-744, 747-748, 755-763, 768, 772, 781-782,; 784-785, 788, 800, 802-805, 808-812, 814-819, 821-822,; 824-835, 837, 839-851, 853-856, 858-859, 861-864, 866-867,
  870, 872-873, 875 and 877; each xaa is any amino acid
GXXXXXXXXXXXXXXXXXXXXXXXXXXXXXXDXXXXXXXXXXXXXXXXXXXXXXXXXXXXXXXXXXXXXXXXXXXXXXXXXXXXXXXXXXXXXXXXXXLXXXXXXXXXXXXXXXXXXFXXXXXXXXXXXXXXXXXXXXXXXXXXXXXXXXXXXXXXXXXXXXXXXXXXXXXXXXXXXFXPXXXXXXXXXXXNXXEXXXXXXXXXXXXXXXXXXXXXXXXXXXXXXXXXXXXXXXXXRXNXGXXXXXXXXXXXXXXXXDXXXXXRXWXXXDXXXXXXXXXXXXXXXXXXXXXXXXXXXXXXXXXPXXXYXTXXXXXXXXXXXXXXXXXXNXXWXXXXXXXXXXYXXRXHFXXXXXXXXXXXXXXXXXXFXXXXXXXXXXXXXXXXXXXXXXXXXXXXXXXXXXXXXXXXXXXXXXXXXXXXXXXXXXXXXXXXXXXXGXEXXXXXXXXXXXXXXXXXXXXXXXXXXXXXXXXXXXXXXXXXXXXXXXXXXXXXXXXXXXXXXXXXXXXXXXXXXXXXXXXXXXXXXXXXXXXXXXXXXXXXXXXXXXXXXXXXXXXXXXXXXXXXXXXXXXXXXXXXXXXXXXXXFXXXXXXXATXXFXXXXXXGXGGFGXVYXGXXXXGXXXVAXKRXXXXSXXXQGXXEFXTEIXXLSXXRHRHLVXLXGXCXEXXEMXLVYEXMXXGXLXXHLXXXXXXXXXXXXXLXWXXRXEICIGXARGLXYLHTXGXXXXIIHRDXKXXNILLDXXXXAKXXDFGLSKXXXXXXXXXHVSTXVKGXFGYLDPEYXXRXXLTXKSDVYSFGVVLXEXXXXRPXXXXXLXXXXXXLXXWXXXXXXXXXXXXIXDXXXXXXXXXXXXXKXXXXAXXCXXXXGXXRPXMXXVXWXLE

SEQ ID NO: 224 - protein, 299 aa, Unknown
  Consensus sequence
  MISC_FEATURE (2)..(297): xaa located in positions 2 to 8, 11 to 12,; 14 to 17, 21, 26, 29, 31 to 34, 36 to 37, 41, 43; to 47, 49, 54 to 55, 58, 61 to 63,66 to 68, 74,
  76, 78, 80, 82 to 83, 85 to 86, 91, 93 to 94,; 96, 98 to 99, 102 to 108, 116,118 to 119, 121,; 125, 127, 132, 136 to 141, 148, 150 to 151,; 157 to 160, 163 to 164, 171 to 176, 184,
  188, 197 to 201, 204, 216, 218 to 221, 223; to 228, 233 to 238, 240 to 241,243 to 252,; 256, 258 to 269, 273 to 276, 278 to 279,; 281 to 284, 286 to 287, 290, 292 to 293
  and 295 to 297; each xaa is any amino acid
  MISC_FEATURE (18)..(271): xaa located in positions 18 to 19, 38, 50 to 51,; 109 to 114, 142, 177 to 179, 229 to 231, 253 to 254
  and 270 to 271; each xaa is any or no amino acid
FXXXXXXXATXXFXXXXXXGXGGFGXVYXGXXXXGXXXVAXKXXXXXSXXXQGXXEFXTEXXXLSXXXHRHLVXLXGXCXEXXEXXLVYEXMXXGXLXXHLXXXXXXXXXXXXXLXWXXRXEICXGXARGLXYLHXXXXXXXIIHRDXKXXNILLDXXXXAKXXDFGLSKXXXXXXXXXHVSTXVKGXFGYLDPEYXXXXXLTXKSDVYSFGVVLXEXXXXRXXXXXXXXXLXXXXXXLXXWXXXXXXXXXXXXIXDXXXXXXXXXXXXXXKXXXXAXXCXXXXGXXRPXMXXVXXXLE

SEQ ID NO: 225 - protein, 97 aa, Unknown
  Consensus sequence
  MISC_FEATURE (1)..(1): xaa in position 1 is Ile, Leu or Val
  MISC_FEATURE (2)..(3): xaa in position 2 to 3 is any amino acid
  MISC_FEATURE (4)..(4): xaa in position 4 is Ala, Gly or Val
  MISC_FEATURE (6)..(6): xaa in position 6 is any amino acid
  MISC_FEATURE (7)..(7): xaa in position 7 is Asn, Asp, Lys, Gly or Ser
  MISC_FEATURE (9)..(9): xaa in position 9 is Asp, Glu, Ser or Gly
  MISC_FEATURE (10)..(11): xaa in position 10 to 11 is any amino acid
  MISC_FEATURE (12)..(13): xaa in position 12 to 13 is any or no amino acid
  MISC_FEATURE (14)..(14): xaa in position 14 is Ile, Leu or Cys
  MISC_FEATURE (16)..(16): xaa in position 16 is any amino acid
  MISC_FEATURE (19)..(19): xaa in position 19 is Phe or Tyr
  MISC_FEATURE (21)..(21): xaa in position 21 is any amino acid
  MISC_FEATURE (23)..(23): xaa in position 23 is Tyr, Phe or His
  MISC_FEATURE (24)..(24): xaa in position 24 is any amino acid
  MISC_FEATURE (25)..(25): xaa in position 25 is Gly or Ala
  MISC_FEATURE (26)..(26): xaa in position 26 is any amino acid
  MISC_FEATURE (27)..(27): xaa in position 27 is Leu, Ile, Val, Phe or Met
  MISC_FEATURE (28)..(28): xaa in position 28 is any amino acid
  MISC_FEATURE (29)..(29): xaa in position 29 is Asp, Gly, Glu or Asn
  MISC_FEATURE (30)..(30): xaa in position 30 is Gly, Thr, Asn, Asp or Lys
  MISC_FEATURE (31)..(31): xaa in position 31 is any amino acid
  MISC_FEATURE (32)..(32): xaa in position 32 is Thr or no amino acid
  MISC_FEATURE (33)..(33): xaa in position 33 is any amino acid
  MISC_FEATURE (34)..(34): xaa in position 34 is Val, Ile, Ala or Leu
  MISC_FEATURE (36)..(36): xaa in position 36 is Val or Ile
  MISC_FEATURE (38)..(38): xaa in position 38 is Arg, Gln, Lys or Leu
  MISC_FEATURE (39)..(39): xaa in position 39 is Gly, Leu, Ala or Ser
  MISC_FEATURE (40)..(42): xaa in position 40 to 42 is any amino acid
  MISC_FEATURE (43)..(43): xaa in position 43 is Ser or Cys
  MISC_FEATURE (44)..(44): xaa in position 44 is any amino acid
  MISC_FEATURE (45)..(46): xaa in position 45 to 46 is any or no amino acid
  MISC_FEATURE (49)..(50): xaa in position 49 to 50 is any amino acid
  MISC_FEATURE (51)..(51): xaa in position 51 is Glu or Gln
  MISC_FEATURE (53)..(53): xaa in position 53 is any amino acid
  MISC_FEATURE (54)..(54): xaa in position 54 is Thr, Asn, Ser or Ala
  MISC_FEATURE (56)..(56): xaa in position 56 is Ile, Val or Leu
  MISC_FEATURE (57)..(57): xaa in position 57 is any amino acid
  MISC_FEATURE (58)..(58): xaa in position 58 is Met, Leu, Thr, Ile or Val
  MISC_FEATURE (59)..(59): xaa in position 59 is Leu or Ile
  MISC_FEATURE (60)..(60): xaa in position 60 is Ser, Ala or Thr
  MISC_FEATURE (61)..(61): xaa in position 61 is any amino acid
  MISC_FEATURE (62)..(62): xaa in position 62 is Leu, Ile, Phe or Val
  MISC_FEATURE (63)..(63): xaa in position 63 is Arg, Gln, His or Asp
  MISC_FEATURE (65)..(65): xaa in position 65 is Arg, Pro, Lys or Val
  MISC_FEATURE (66)..(66): xaa in position 66 is His or Asn
  MISC_FEATURE (69)..(69): xaa in position 69 is Ser, Lys, Ala, Thr or Arg
  MISC_FEATURE (70)..(70): xaa in position 70 is Leu, Met or Phe
  MISC_FEATURE (71)..(71): xaa in position 71 is Ile, Tyr, Leu, Val or Thr
  MISC_FEATURE (73)..(73): xaa in position 73 is Tyr, Cys or Phe
  MISC_FEATURE (74)..(74): xaa in position 74 is Cys, Ser or Thr
  MISC_FEATURE (75)..(75): xaa in position 75 is any amino acid
  MISC_FEATURE (76)..(76): xaa in position 76 is Glu or Asp
  MISC_FEATURE (77)..(78): xaa in position 77 to 78 is any amino acid
  MISC_FEATURE (79)..(79): xaa in position 79 is Glu, Gln, Asn, Lys or Thr
  MISC_FEATURE (80)..(80): xaa in position 80 is Met, Pro, Arg, Leu or Asn
  MISC_FEATURE (81)..(81): xaa in position 81 is Ile, Leu, Val or Cys
  MISC_FEATURE (82)..(82): xaa in position 82 is Leu or Ile
  MISC_FEATURE (83)..(83): xaa in position 83 is Val, Ile or Leu
  MISC_FEATURE (84)..(84): xaa in position 84 is Tyr or Thr
  MISC_FEATURE (85)..(85): xaa in position 85 is Glu or Asp
  MISC_FEATURE (86)..(86): xaa in position 86 is Tyr, Phe, His or Leu
  MISC_FEATURE (87)..(87): xaa in position 87 is Met, Val or Leu
  MISC_FEATURE (88)..(88): xaa in position 88 is any amino acid
  MISC_FEATURE (89)..(89): xaa in position 89 is Asn, His, Lys or Phe
  MISC_FEATURE (90)..(90): xaa in position 90 is Gly or Asn
  MISC_FEATURE (91)..(91): xaa in position 91 is Thr, Pro, Ser or Cys
  MISC_FEATURE (92)..(92): xaa in position 92 is Leu, Phe, Met or Val
  MISC_FEATURE (93)..(94): xaa in position 93 to 94 is any amino acid
  MISC_FEATURE (95)..(95): xaa in position 95 is His, Ala or Arg
  MISC_FEATURE (96)..(96): xaa in position 96 is Leu or Ile
  MISC_FEATURE (97)..(97): xaa in position 97 is Tyr, Phe or His
XXXXTXXFXXXXXXGXGGXGXVXXXXXXXXXXXXAXKXXXXXXXXXQGXXXFXXEXXXXXXXXHXXLVXXXGXXXXXXXXXXXXXXXXXXXXXXXXX

SEQ ID NO: 226 - protein, 56 aa, Unknown
  Consensus sequence
  MISC_FEATURE (1)..(1): xaa in position 1 is Leu, Ile, Thr or Met
  MISC_FEATURE (2)..(2): xaa in position 2 is any amino acid
  MISC_FEATURE (3)..(3): xaa in position 3 is Trp or Phe
  MISC_FEATURE (4)..(5): xaa in position 4 to 5 is any amino acid
  MISC_FEATURE (7)..(7): xaa in position 7 is Leu, Val or Phe
  MISC_FEATURE (8)..(8): xaa in position 8 is Glu, Asp or Lys
  MISC_FEATURE (9)..(9): xaa in position 9 is Ile, Ala or Val
  MISC_FEATURE (10)..(10): xaa in position 10 is any amino acid
  MISC_FEATURE (11)..(11): xaa in position 11 is Ile, Leu, Val or Ala
  MISC_FEATURE (12)..(12): xaa in position 12 is Gly or Asp
  MISC_FEATURE (13)..(13): xaa in position 13 is Ala, Ser, Ile or Val
  MISC_FEATURE (15)..(15): xaa in position 15 is Arg, Lys or His
  MISC_FEATURE (16)..(16): xaa in position 16 is Gly or Ala
  MISC_FEATURE (17)..(17): xaa in position 17 is Leu or Ile
  MISC_FEATURE (18)..(18): xaa in position 18 is any amino acid
  MISC_FEATURE (19)..(19): xaa in position 19 is Tyr or Phe
  MISC_FEATURE (22)..(22): xaa in position 22 is Thr, Glu, Ser or Leu
  MISC_FEATURE (23)..(27): xaa in position 23 to 27 is any amino acid
  MISC_FEATURE (28)..(28): xaa in position 28 is any or no amino acid
  MISC_FEATURE (29)..(30): xaa in position 29 to 30 is Ile or Val
  MISC_FEATURE (34)..(34): xaa in position 34 is Val, Ile or Leu
  MISC_FEATURE (36)..(37): xaa in position 36 to 37 is Thr, Ser or Ala
  MISC_FEATURE (39)..(39): xaa in position 39 is Ile or Val
  MISC_FEATURE (41)..(41): xaa in position 41 is Leu, Val or Ile
  MISC_FEATURE (42)..(42): xaa in position 42 is Asp, Thr or Gly
  MISC_FEATURE (43)..(46): xaa in position 43 to 46 is any amino acid
  MISC_FEATURE (47)..(47): xaa in position 47 is Ala, Pro or Thr
  MISC_FEATURE (49)..(49): xaa in position 49 is Val, Ile or Met
  MISC_FEATURE (50)..(50): xaa in position 50 is Ala or Ser
  MISC_FEATURE (54)..(54): xaa in position 54 is Leu, Phe, Ile or Val
  MISC_FEATURE (55)..(55): xaa in position 55 is Ser or Ala
  MISC_FEATURE (56)..(56): xaa in position 56 is Lys or Arg
XXXXXRXXXXXXXAXXXXXLHXXXXXXXXXHRDXKXXNXLXXXXXXXKXXDFGXXX

SEQ ID NO: 227 - protein, 43 aa, Unknown
  Consensus sequence
  MISC_FEATURE (1)..(1): xaa in position 1 is His or Asn
  MISC_FEATURE (2)..(2): xaa in position 2 is Val or Ile
  MISC_FEATURE (3)..(3): xaa in position 3 is Ser, Thr or Asn
  MISC_FEATURE (4)..(4): xaa in position 4 is Thr, Ser or Ile
  MISC_FEATURE (5)..(5): xaa in position 5 is any amino acid
  MISC_FEATURE (6)..(6): xaa in position 6 is Val or Ile
  MISC_FEATURE (7)..(7): xaa in position 7 is Lys, Ala, Met or Arg
  MISC_FEATURE (9)..(9): xaa in position 9 is Ser or Thr
  MISC_FEATURE (10)..(10): xaa in position 10 is Phe, Ile, Ala or Val
  MISC_FEATURE (13)..(13): xaa in position 13 is Leu, Met or Val
  MISC_FEATURE (14)..(14): xaa in position 14 is Asp or Ala
  MISC_FEATURE (18)..(22): xaa in position 18 to 22 is any amino acid
  MISC_FEATURE (23)..(23): xaa in position 23 is Leu or Met
  MISC_FEATURE (25)..(25): xaa in position 25 is Glu, Asp or Gln
  MISC_FEATURE (26)..(26): xaa in position 26 is Lys, Ser or Arg
  MISC_FEATURE (27)..(27): xaa in position 27 is Ser, Val or Ala
  MISC_FEATURE (29)..(29): xaa in position 29 is Val or Ile
  MISC_FEATURE (30)..(30): xaa in position 30 is Tyr or Phe
  MISC_FEATURE (31)..(31): xaa in position 31 is Ser or Ala
  MISC_FEATURE (34)..(34): xaa in position 34 is Val or Ile
  MISC_FEATURE (35)..(35): xaa in position 35 is Val, Met, Ile or Leu
  MISC_FEATURE (36)..(36): xaa in position 36 is Leu, Ala or Met
  MISC_FEATURE (37)..(37): xaa in position 37 is Leu, Phe, Met or Val
  MISC_FEATURE (39)..(39): xaa in position 39 is any amino acid
  MISC_FEATURE (40)..(40): xaa in position 40 is Leu, Val, Ala or Ile
  MISC_FEATURE (41)..(41): xaa in position 41 is any amino acid
  MISC_FEATURE (42)..(42): xaa in position 42 is Ala, Gly or Cys
  MISC_FEATURE (43)..(43): xaa in position 43 is Arg, His or Lys
XXXXXXXGXXGYXXPEYXXXXXXTXXXDXXXFGXXXXEXXXXX

SEQ ID NO: 228 - DNA, 475 bp, Arabidopsis thaliana
  CDS (33)..(329)
ggaggaggacgagagtgtgtgagaaagaggagatggcggcgatgcagtggtgcggcgcgatgacacgacggattatgatgacgcagcgaacatctgcagctctgaattgttcggcgaggtattcatcgttatctccggcgtgtgcagctccggcggtatcggaaatggatttgtgtgggagaggagataagaagacgaagaaagggaaaagattcaaaggatcgtacgggaattcgagagggaagaaacagaagatgattgagagaatcaaagacaagcttgagcttcccaggtctactccttggcctcttcctttcaagctcatctgaatctcttgttaggggttttctcctcttttgccaacaacaaaaatgtcgcctttagtggcggttctctctgtatactttttgttatgaatcattgaacttgtttgaaattgaaattggtcatcaatatttcctcttttactggtgaa

SEQ ID NO: 229 - protein, 98 aa, Arabidopsis thaliana
MAAMQWCGAMTRRIMMTQRTSAALNCSARYSSLSPACAAPAVSEMDLCGRGDKKTKKGKRFKGSYGNSRGKKQKMIERIKDKLELPRSTPWPLPFKLI

SEQ ID NO: 230 - DNA, 246 bp, Triticum aestivum
  CDS (1)..(246)
atggcgctgcggatggcggcggctgcgttcgtgcggcgcctggcgccggcgcgccccccggcgctcctggcggaggcggaggccgtgacgtgcgggcgcggggacaagaagaccaagcgcgggaagcggttcaagggctcctacggcaactcgcggccgaagcgggagaagaagatcgagcgcatcaaggaccgcgtcgaggtgccccgctccaccccgtggcccctccccttcaagctcatctga

SEQ ID NO: 231 - protein, 81 aa, Triticum aestivum
MALRMAAAAFVRRLAPARPPALLAEAEAVTCGRGDKKTKRGKRFKGSYGNSRPKREKKIERIKDRVEVPRSTPWPLPFKLI

SEQ ID NO: 232 - DNA, 276 bp, Brassica napus
  CDS (1)..(276)
atgcagtggtgcagctcgatgacgcggcgggttatgatgacgcagcgtacatctccagcactgacttgttcggcgaggtattcttcgttatgcccggcggtggcggcgtcgatggaagtgtgcgggagaggggatagtaagacgaagaaagggaaaaggttcaaaggatcgtacgggaactcgagagggaagaagcagaagatgattgagagaatcaaagacaagctcgaagtccccagatccactccttggcctctccctttcaagctcatctga

SEQ ID NO: 233 - protein, 91 aa, Brassica napus
MQWCSSMTRRVMMTQRTSPALTCSARYSSLCPAVAASMEVCGRGDSKTKKGKRFKGSYGNSRGKKQKMIERIKDKLEVPRSTPWPLPFKLI

SEQ ID NO: 234 - DNA, 252 bp, Glycine max
  CDS (1)..(252)
atggccgttaatggtgcgagcgtgatgctgcggtgcagcgtggctgcgaggttgttcatgacggcggacagggtggcgccggcggtgcctcaggtgtgtgggcgcggggacaagaagacgaagaaaggaaagaggttcaagggatcgtacggtaacgctaggccgaagaaagagaagatgatagagcgcatcaaggacaaggtcgaagttcccaggtccactccttggcctctccctttcaagctcatctga

SEQ ID NO: 235 - protein, 83 aa, Glycine max
MAVNGASVMLRCSVAARLFMTADRVAPAVPQVCGRGDKKTKKGKRFKGSYGNARPKKEKMIERIKDKVEVPRSTPWPLPFKLI

SEQ ID NO: 236 - DNA, 357 bp, Arabidopsis thaliana
  CDS (1)..(357)
atggcgtcgcttatactcggagctcctccgcgagtcaccgtcgcattaccttcctcacggttatcatcttctcactctgaaactgccggtgtctctctctcttgcttcactcatcaattctctctctccacttcctcatccagctcaattccactcgtgtactgtggcagaggtgaccggaaaacagctaaaggaaagcgtttcaatcactcttttgggaatgcgaggccaagaaacaagagcaaaggaagaggaccggagagagtaccggttcctccagcaccaccgaggaaagataagtttgagaacgacgagaagatcaaaatcgatatcgacgagtctctcttctctaattag

SEQ ID NO: 237 - protein, 118 aa, Arabidopsis thaliana
MASLILGAPPRVTVALPSSRLSSSHSETAGVSLSCFTHQFSLSTSSSSSIPLVYCGRGDRKTAKGKRFNHSFGNARPRNKSKGRGPERVPVPPAPPRKDKFENDEKIKIDIDESLFSN

SEQ ID NO: 238 - DNA, 381 bp, Oryza sativa
  CDS (1)..(381)
atggcgctcctcgccgtccacgccatggccgcgtccccggccaccttcccctcctcccaccaccacgccgccgtctcctcctactgcgcgctccccgccgccgccgcattctcccgctcccgctctcgcgtcgccgccgccgccgccgccaccctctcggccccgctcactccagttcttgaagtttactgcgggagaggggacaagaagaccaagaggggaaaaaggttcaaccactcgtacggaaatgcgaggccgcgcaacaagaagaagggaactggccctgcacggctgttcgcgccgcctgcgcctccgaggaaggaccagttcgacgacggcgaggtcaccccgatcgacatcgacgatgacatcctggaatag

SEQ ID NO: 239 - protein, 126 aa, Oryza sativa
MALLAVHAMAASPATFPSSHHHAAVSSYCALPAAAAFSRSRSRVAAAAAATLSAPLTPVLEVYCGRGDKKTKRGKRFNHSYGNARPRNKKKGTGPARLFAPPAPPRKDQFDDGEVTPIDIDDDILE

SEQ ID NO: 240 - DNA, 249 bp, Oryza sativa
  CDS (1)..(249)
atggcgatgcggctggcggcggcggcggcgttcgtgcgacgcctcgtgccggcgcgaaatccggtgatctcggcggaggcggaggcggtgacctgcgggcgcggggacaagaagaccaagcgcgggaagcggttcaagggctcctacggcaacgcgcggccgaagcgggagaagaagatcgagcgcatcaaggaccgcgtcgaggtgccccgctccaccccgtggccgctccccttcaagctcatctga

SEQ ID NO: 241 - protein, 82 aa, Oryza sativa
MAMRLAAAAAFVRRLVPARNPVISAEAEAVTCGRGDKKTKRGKRFKGSYGNARPKREKKIERIKDRVEVPRSTPWPLPFKLI

SEQ ID NO: 242 - DNA, 267 bp, Zea mays
  CDS (1)..(267)
atggcaatgcggttggcggctgcggccacgttcgtgcggcgcctggcgccggcgcgcccaccagtacgcatcctggcggcggcatctacggcggaagcggaggcagtgacgtgcgggcgcggggacaagaaaaccaagcgcgggaagcggttcaagggctccttcggcaacgcacggcccaagcgggagaagaagattgagcgcatcaaggaccgcgtcgaggtgccccgctccacaccctggcccctccccttcaagcttatctga

SEQ ID NO: 243 - protein, 88 aa, Zea mays
MAMRLAAAATFVRRLAPARPPVRILAAASTAEAEAVTCGRGDKKTKRGKRFKGSFGNARPKREKKIERIKDRVEVPRSTPWPLPFKLI

SEQ ID NO: 244 - DNA, 22 bp, Primer
atggcggcgatgcagtggtgcg

SEQ ID NO: 245 - DNA, 24 bp, Primer
tcagatgagcttgaaaggaagagg

SEQ ID NO: 246 - protein, 61 aa, Unknown
  Consensus sequence
  MISC_FEATURE (6)..(60): xaa located in positions 6, 10, 15 to 16, 18, 21, 23 to 26, 28 to 32, 46 to 47, 49 to 52 and 55 to 60; each xaa is any amino acid
  MISC_FEATURE (33)..(43): xaa located in positions 33 to 43 is any or no amino acid
CGRGDXKTKXGKRFXXSXGNXRXXXXKXXXXXXXXXXXXXXXXKDXXEXXXXTPXXXXXXL

SEQ ID NO: 247 - protein, 28 aa, Unknown
  Consensus sequence
  MISC_FEATURE (6)..(6): xaa in position 6 is Lys, Ser or Arg
  MISC_FEATURE (9)..(9): xaa in position 9 is Lys or Ala
  MISC_FEATURE (10)..(10): xaa in position 10 is Lys or Arg
  MISC_FEATURE (15)..(15): xaa in position 15 is Lys or Asn
  MISC_FEATURE (16)..(16): xaa in position 16 is Gly or His
  MISC_FEATURE (18)..(18): xaa in position 18 is Tyr or Phe
  MISC_FEATURE (21)..(21): xaa in position 21 is Ala or Ser
  MISC_FEATURE (23)..(23): xaa in position 23 is Pro or Gly
  MISC_FEATURE (24)..(24): xaa in position 24 is Lys or Arg
  MISC_FEATURE (25)..(25): xaa in position 25 is Lys, Arg or Asn
  MISC_FEATURE (26)..(26): xaa in position 26 is Glu, Gln or Lys
  MISC_FEATURE (27)..(27): xaa in position 27 is Lys or Ser
  MISC_FEATURE (28)..(28): xaa in position 28 is Lys or Met
CGRGDXKTXXGKRFXXSXGNXRXXXXXX

SEQ ID NO: 248 - protein, 23 aa, Unknown
  Consensus sequence
  MISC_FEATURE (1)..(1): xaa in position 1 is Ile or Ala
  MISC_FEATURE (2)..(2): xaa in position 2 is Glu or Pro
  MISC_FEATURE (3)..(3): xaa in position 3 is Arg or Pro
  MISC_FEATURE (4)..(4): xaa in position 4 is Ile or Arg
  MISC_FEATURE (7)..(7): xaa in position 7 is Lys, Arg or Gln
  MISC_FEATURE (8)..(8): xaa in position 8 is Val, Leu or Phe
  MISC_FEATURE (9)..(9): xaa in position 9 is Glu or Asp
  MISC_FEATURE (10)..(10): xaa in position 10 is any amino acid
  MISC_FEATURE (11)..(11): xaa in position 11 is Pro, Gly or Asp
  MISC_FEATURE (12)..(12): xaa in position 12 is Arg or Glu
  MISC_FEATURE (13)..(13): xaa in position 13 is Ser, Lys or Val
  MISC_FEATURE (14)..(14): xaa in position 14 is Thr or Ile
  MISC_FEATURE (15)..(15): xaa in position 15 is Pro or Lys
  MISC_FEATURE (16)..(16): xaa in position 16 is Trp or Ile
  MISC_FEATURE (17)..(17): xaa in position 17 is Pro or Asp
  MISC_FEATURE (18)..(18): xaa in position 18 is Leu or Ile
  MISC_FEATURE (19)..(19): xaa in position 19 is Pro or Asp
  MISC_FEATURE (20)..(20): xaa in position 20 is Phe, Asp or Glu
  MISC_FEATURE (21)..(21): xaa in position 21 is Lys, Ser or Asp
  MISC_FEATURE (22)..(22): xaa in position 22 is Leu or Ile
  MISC_FEATURE (23)..(23): xaa in position 23 is Ile, Phe or Leu
XXXXKDXXXXXXXXXXXXXXXXX

SEQ ID NO: 249 - DNA, 2793 bp, Arabidopsis thaliana
  CDS (1)..(2793)
atgaatgctaatgagcaaactcgatccgccaatggcattggcaatggcaatggtgagtctattcccgggattccagatgacttacggtgcaagagatcggatggtaaacagtggagatgcactgcaatgtccatggctgataagactgtttgtgagaagcactacatccaagcaaagaagcgggcggctaattctgctttcagggcgaaccagaagaaagcgaaaaggcgatcatcgttaggcgaaacagatacgtattcggaagggaagatggatgatttcgagttaccagtcaccagcattgaccactataataacggtcttgcctctgcttccaagagtaatggtagactagagaagagacataataaaagcctgatgcggtactcgcccgagacaccgatgatgaggagtttctctccacgtgttgcagtggatttgaatgatgacttgggtagagatgttgtaatgtttgaagagggctacagatcttataggacaccaccatctgttgctgttatggatccgacacgaaacagatcacaccaaagcaccagtcctatggaatactcagcagcaagcacagatgtgtctgcagagtctttgggggaaatctgccatcaatgccagagaaaagatagagagagaatcatttcttgcctcaaatgcaatcaaagagccttctgccacaattgtctatcggcaaggtactcggagatatcacttgaagaagtcgagaaagtttgccctgcatgtcgtggcttgtgtgattgcaaatcttgcctgcgttcagataatacaataaaggttcggatccgggaaatacccgttttggacaagttgcagtatctttatcgtctattatcagctgtcctaccagtcataaagcagatccatcttgaacaatgtatggaagttgaactagagaagaggcttcgtgaagttgagattgatcttgtcagggcaagattgaaagcagatgagcagatgtgctgcaacgtgtgtcggataccagttgttgactactaccgtcactgtccgaactgctcatatgacctttgcctgagatgctgtcaagatctacgggaagagtcttcagtgacgattagtgggactaaccaaaacgtacaagatagaaaaggagctcccaaactaaaactaaacttttcatacaagtttcctgagtgggaagccaacggtgatgggagcatcccttgccctcctaaggagtatggaggctgcggttcacattctttgaatcttgcccgcattttcaagatgaattgggttgcaaagcttgtgaaaaatgctgaggagattgttagtggctgcaaattatctgatcttctgaaccctgatatgtgtgattcaagattctgcaaatttgctgagagagaagagagcggtgacaactacgtgtacagcccgtcgcttgaaacgattaaaactgatggagtagctaagtttgagcaacaatgggcagagggtcggcttgttactgtgaaaatggtacttgatgactcatcttgctctagatgggatcctgagactatttggagggatatagacgagctttcggacgagaaactgagagaacatgatccattcttgaaggccattaattgcttggatggtttagaggttgatgtaagacttggggagtttacaagagcatataaagatggaaagaaccaagagacaggtcttccgctattgtggaagttaaaggactggccgagcccaagtgcttccgaggagttcattttctaccaaagacctgagtttatcagaagttttccgtttctcgagtacattcatccccggttaggccttctgaatgttgcagccaagttacctcattactcgctccaaaacgattcaggtccaaagatttatgtgtcttgtgggacgtaccaagaaatcagtgctggcgattcattgactggtattcactacaacatgcgtgacatggtatacctattggtgcacacgtctgaagaaacaacattcgaaagggtgagaaaaacaaaacctgttccagaggaacctgaccagaagatgagcgaaaatgagtcacttcttagccctgagcagaaattaagggacggagagttacatgatctatcacttggtgaagccagtatggagaagaatgaacctgagttggcgttgactgtgaatccagagaacttaacggaaaacggtgacaacatggaatcttcttgcacatcttcatgtgcaggaggagcccagtgggatgtctttcgacgccaagacgtcccaaagttgtccgggtatttgcagagaacattccagaagcctgataatatccagactgattttgtgtcacgcccgttgtatgaaggattgttcttaaatgaacaccacaagagacaactaagagacgagtttggagttgagccatggacatttgagcaacatcgtggtgaggctatcttcattccggctggatgtccgttccaaatcactaatcttcagtcgaatattcaggtggcacttgacttcttgtgccctgaaagcgttggagagtcagcaagactagctgaagaaatccggtgtttaccaaacgaccacgaggcaaaacttcagattctagagattggaaagatatcattatacgcagctagctcagccattaaagaggttcagaaactggtcttggatccaaagtttggagcagagcttggatttgaagactctaacttaaccaaagcagtctctcacaacttagacgaggcaaccaagcggccgcagcaaaacagctgcacttaa

SEQ ID NO: 250 - protein, 930 aa, Arabidopsis thaliana
MNANEQTRSANGIGNGNGESIPGIPDDLRCKRSDGKQWRCTAMSMADKTVCEKHYIQAKKRAANSAFRANQKKAKRRSSLGETDTYSEGKMDDFELPVTSIDHYNNGLASASKSNGRLEKRHNKSLMRYSPETPMMRSFSPRVAVDLNDDLGRDVVMFEEGYRSYRTPPSVAVMDPTRNRSHQSTSPMEYSAASTDVSAESLGEICHQCQRKDRERIISCLKCNQRAFCHNCLSARYSEISLEEVEKVCPACRGLCDCKSCLRSDNTIKVRIREIPVLDKLQYLYRLLSAVLPVIKQIHLEQCMEVELEKRLREVEIDLVRARLKADEQMCCNVCRIPVVDYYRHCPNCSYDLCLRCCQDLREESSVTISGTNQNVQDRKGAPKLKLNFSYKFPEWEANGDGSIPCPPKEYGGCGSHSLNLARIFKMNWVAKLVKNAEEIVSGCKLSDLLNPDMCDSRFCKFAEREESGDNYVYSPSLETIKTDGVAKFEQQWAEGRLVTVKMVLDDSSCSRWDPETIWRDIDELSDEKLREHDPFLKAINCLDGLEVDVRLGEFTRAYKDGKNQETGLPLLWKLKDWPSPSASEEFIFYQRPEFIRSFPFLEYIHPRLGLLNVAAKLPHYSLQNDSGPKIYVSCGTYQEISAGDSLTGIHYNMRDMVYLLVHTSEETTFERVRKTKPVPEEPDQKMSENESLLSPEQKLRDGELHDLSLGEASMEKNEPELALTVNPENLTENGDNMESSCTSSCAGGAQWDVFRRQDVPKLSGYLQRTFQKPDNIQTDFVSRPLYEGLFLNEHHKRQLRDEFGVEPWTFEQHRGEAIFIPAGCPFQITNLQSNIQVALDFLCPESVGESARLAEEIRCLPNDHEAKLQILEIGKISLYAASSAIKEVQKLVLDPKFGAELGFEDSNLTKAVSHNLDEATKRPQQNSCT

SEQ ID NO: 251 - DNA, 2078 bp, Brassica napus
  CDS (237)..(1862)
caagaaataagttatatttctaccgtatcatgtgttagacttcaacaacagagtatagagttaagtgattaaggaggagaaggtacaacaggaaagtgccattgaaagaagacgaagacgagaagaaggatgatgaacttgtttctaaaggctctgttaaggttactaagaggcctcggaaagtggtggtaggttgtctcaacaaagacgaggataaagctgaagaatctgagtgcatgatgtgtcatcaatgtcaacgtaacgataatggggaggttgtgcggtgtcagaactgctgcgataggaagcgttattgccacaaatgcttagaaacttggtaccctcgcatcccacatgaagacattgccaagaaatgcccgttttgctggaatacttgcaattgcagagcatgcttgcgtctagatactaaaatggaagggttaaattcagacctcaaggttagcaaggacgaagaagtccaatgctctaagtatattctgcaaaagcttctcccacatctgaaggaaataaacgatgaacaagttcttgagaaggaagctgaggcaaatatatcaggactggagtttggagaggtgaagcctgaagacactaattgtagccctggcgaaagactatactgtgatagctgccagactgccatctttgaccttcatagacattgctcgagctgcggttctgatatctgcattgcatgttccatggagatccgaaaaggaaagcttcaggcatgtcaggaggatgtttactggaattacattagcagaggtttagattatctacatggaggaaaagaaaaaattggtaaacctacggatgataagctggagccggaaccattacttgctattgtcaagcccccatctacttggaaaacagatgaagtcggactcattacttgctgttgtggtgaggggattttagagttgaaacgcgtgcttcccgatggttgggtatcagaattggtcaaaaaggttgaagaaactgttgaagccaacaagctttttgatttacctgaaatggccacagagagatgcccttgttttgactctgaaggtcatattgacatggacaccaacaaaaacgtgttaaaggctgcatgtcgagaaggatcagaagacaattatctatattttccaagtgctacagatgctcaggaggagattaatctgaagcattttcagcatcattgggcaaaaggagagcctgtgattgtgaggaacgtgcttgaggctacagctggtttaagctgggaaccaggtgttatgcatcgtgcttgccgtcagatgagaagcaccaagcatgaaacacttctggacgttaatgctattgattgtctagactgctgtgagggatctattaatcttcatgcattctttaccggttaccaaaaaggccgttatgatcgtgagggttggccaagtgttctgaaactgaaagattggcctccatcgaagagcttcaatgaaaacttgccgcgtcactgtgaggagttcttatgcagtttgcctttgaagcagtacactcacccggttagtgggcctttaaatcttgccgtgaagttgcctgatttttgcttgaaaccggacatgggaccaaagacttacgttgcttatggatttgcgcaagaaatgggccgtggagattcagtaaccaaactccactgcgacatgtctgatgcggttaatgtgctgacccacgtaagtgaagtgaccatcaaagaggaagacttgaatccaaattacaggtctcatgtagccaaagaggaggagaagaaggtgacaaagactggaaggaagcgtaaaaaccgtgagatgagtaatggagctaatgtgttggcttgatctgtcgtttgttgtttgtgttgttatgtcgtttgttgttgtagcagtgttagcaaggagcgtgtgagaaggataaatccattttggcactttcctgttgtaccttctcctccttaatcacttaactctatactctgttgttgaagtctaacacatgatacggtagaaatataacttatttcttgaaaaaaaaaaaaaaaaaaaccccccgggcca

SEQ ID NO: 252 - protein, 541 aa, Brassica napus
MMCHQCQRNDNGEVVRCQNCCDRKRYCHKCLETWYPRIPHEDIAKKCPFCWNTCNCRACLRLDTKMEGLNSDLKVSKDEEVQCSKYILQKLLPHLKEINDEQVLEKEAEANISGLEFGEVKPEDTNCSPGERLYCDSCQTAIFDLHRHCSSCGSDICIACSMEIRKGKLQACQEDVYWNYISRGLDYLHGGKEKIGKPTDDKLEPEPLLAIVKPPSTWKTDEVGLITCCCGEGILELKRVLPDGWVSELVKKVEETVEANKLFDLPEMATERCPCFDSEGHIDMDTNKNVLKAACREGSEDNYLYFPSATDAQEEINLKHFQHHWAKGEPVIVRNVLEATAGLSWEPGVMHRACRQMRSTKHETLLDVNAIDCLDCCEGSINLHAFFTGYQKGRYDREGWPSVLKLKDWPPSKSFNENLPRHCEEFLCSLPLKQYTHPVSGPLNLAVKLPDFCLKPDMGPKTYVAYGFAQEMGRGDSVTKLHCDMSDAVNVLTHVSEVTIKEEDLNPNYRSHVAKEEEKKVTKTGRKRKNREMSNGANVLA

SEQ ID NO: 253 - DNA, 3266 bp, Glycine max
  CDS (187)..(3012)
gacaacacaactgtctccattcccgcactaaccgacgcgcgccgccgccgccgccgccgccgtaacctcaatctccgaacaactcacttgcttcaaatttcaattcctgtctctccgcgcttatcttctactacattccaactgttagtaaaatagggtttgcttcggttagggtttcttcctcagatggataacgcccgatcagcgaacggcgaggagaatgcggcgggaatcccggacgatttgcggtgcaagaggtccgacgggaagcagtggcggtgcacggcgatgtcgatgccggacaagaccgtctgcgagaagcactacatccaggcaaagaagcgcgccgcgaattccgctatgagagcgaatctcaagaaagcgaagaggaagtcgcagtcgctgtcgctgaacgagtccgataatgtttatatggagagcaagagcgacgatttcgatgttcctctctcctccattggcctctctcagaagaagctctccaagaaccagttccgctacgagccggagcgcgacgcgccgcgaagaggctcgtccgcgagacgctcttcgaacctcaacgacgatgatgatgatgacgatgacgacgacgtggatggggatgcggatgctgatgtggcgctctatgaggaagagaattgggtctcctgtgactcgccgccggattcttcgcgcaagaggtcgcggaggagcttggaagctaatgctaccactgaatattcggacggaacctccgccggttcttccgacgaggacaccggcgggcagacttgtcaccagtgccggaggaatgaccgcgaccgagttacttggtgtcaacggtgtgataggaggggatattgtgatagctgtttatcaacatggtactcggacatttcattggatgaaattcagaggatatgtcctgcttgccggggtatatgtaattgcaagacttgtttgcgaagtgataattcaattaaggttcggatacgcgagatacctgttctagataagttacagtatctccatgtgctgctgtcgtctgtgctacctgtggtaaagcagatccactgtgaacagagttttgaagttgaacttgaaaagaagttgcgtggtgctgaaatagatcttccaaggataaaattgaactcagatgagcagatgtgctgcaatttctgtaggatacctattactgattatcatcgacgctgtccaagttgttcatatgatttgtgccttagttgctgtcgagatcttcgagaagcaactgcagatcacaataaagaaccccaaacagagcaagcaaaaacttctgatcgaaatatattaagtaaatttcctcattggagatccaatgacaatggaagtattccatgtccccctaaggagtgtggtggctgtggttattcttcactaaatttaagccggattttcaagatgaactgggttgcaaagttggtgaaaaatgtagaggaaatggttagtggctgcagaattagtaatgccgatggtccaccggaaaccgggctgaatgatctgaaactttgccaatattctcacagagaagccagtgatgataattatctttattgcccagcatccgacgatatcaaaactgatgggattgacaattttagaaagcattggaaaactggtgagcccattattgttaagcaagtatttgatgggtcatccatttcaagccgggatccaatggtcatatggagagggattctagagacaatagatgagaaagcgaaagatgaaaaccggatggttaaggccatagattgcttagatgggtctgagattgatattgagcttgctcagttcatgaaaggatactttgaagggcttattcttgaaaatggttggccacagttattgaaattgaaagattggccttcacctagtgcttctgaagaatttctgttgtaccaaagacctgagtttatcagcaaactacctttacttcagtatattcactccaagtggggccttctcaatgttgcagctaaattgcctcattactccttgcagaatgatgtaggacccaagatatatatatcttatgggattagtgatgaacttggtagaggtgattcagtgacaaatctccacttcaatatgcgtgacatggtgtaccttttggttcatacaaatgaagtaaagctgaaggactggcagagaactaaaattgaaatgatgcaaaaagctaaagctaataaggaatttgaggcaaaagaatcacatggggatcctcaaatatcttcaagggggagttcacctgattcctcacttggtacaaaaagtagtggactggaaatagactcaaaccagaataagtcaattatggatcaagggtttgaaatttattctagtgctgaaggtaatacggccaattgtaaacttccattcaatcaaaatggagacgtctctgagaaaacacatcctggagttctttgggatgtttttcgtcggcaggatgttccaatattgactaaatatttgaaaatacattggaaggaatttgggaagtcagatgatcttggaaatgaatttgttgaatggcctctttatgatggagctatttttcttgacaaacaccataaaagaaagttgaaggaagaatttggagtggagccttggtcatttgaacagaatttgggggaagctatttttgttcctgctggttgccctttccaagcaaggaatgttcagtccaatgttcagttaggccttgatttcttatctccggaaagcgtgggtgatgctgtaagattggcagaggaaattcgctgtgtacctaatgaacatgaagcaaagcttcaagttttggaggttgggaagatctccctttatgcagcaagttcagccatcaaagaagttcaaaaacttgtacttgacccaaaacttggcgcccagatcggttatggagatcctaatttgactgcaatggtttccgagaattatgagaagatggttaagcggaggcagattacttgtgcttgaacttccacactcggtcattgaatccggaaagaggggggattgtgtacattagttgtatttgagcaatattttatgggttggtattttcagtgtagttttgatcaaatacctaggtaatcatttaaatgtgtataatagttacgttagagaatcatgtaatgaccaacttcaaatctgattttatttcaaaatgtggaaaagaaacaatgtaatatatacaaagctaaaaatttgtgtctgctgccctttaagtt

SEQ ID NO: 254 - protein, 941 aa, Glycine max
MDNARSANGEENAAGIPDDLRCKRSDGKQWRCTAMSMPDKTVCEKHYIQAKKRAANSAMRANLKKAKRKSQSLSLNESDNVYMESKSDDFDVPLSSIGLSQKKLSKNQFRYEPERDAPRRGSSARRSSNLNDDDDDDDDDDVDGDADADVALYEEENWVSCDSPPDSSRKRSRRSLEANATTEYSDGTSAGSSDEDTGGQTCHQCRRNDRDRVTWCQRCDRRGYCDSCLSTWYSDISLDEIQRICPACRGICNCKTCLRSDNSIKVRIREIPVLDKLQYLHVLLSSVLPVVKQIHCEQSFEVELEKKLRGAEIDLPRIKLNSDEQMCCNFCRIPITDYHRRCPSCSYDLCLSCCRDLREATADHNKEPQTEQAKTSDRNILSKFPHWRSNDNGSIPCPPKECGGCGYSSLNLSRIFKMNWVAKLVKNVEEMVSGCRISNADGPPETGLNDLKLCQYSHREASDDNYLYCPASDDIKTDGIDNFRKHWKTGEPIIVKQVFDGSSISSRDPMVIWRGILETIDEKAKDENRMVKAIDCLDGSEIDIELAQFMKGYFEGLILENGWPQLLKLKDWPSPSASEEFLLYQRPEFISKLPLLQYIHSKWGLLNVAAKLPHYSLQNDVGPKIYISYGISDELGRGDSVTNLHFNMRDMVYLLVHTNEVKLKDWQRTKIEMMQKAKANKEFEAKESHGDPQISSRGSSPDSSLGTKSSGLEIDSNQNKSIMDQGFEIYSSAEGNTANCKLPFNQNGDVSEKTHPGVLWDVFRRQDVPILTKYLKIHWKEFGKSDDLGNEFVEWPLYDGAIFLDKHHKRKLKEEFGVEPWSFEQNLGEAIFVPAGCPFQARNVQSNVQLGLDFLSPESVGDAVRLAEEIRCVPNEHEAKLQVLEVGKISLYAASSAIKEVQKLVLDPKLGAQIGYGDPNLTAMVSENYEKMVKRRQITCA

SEQ ID NO: 255 - DNA, 2988 bp, Oryza sativa (japonica cultivar-group)
  CDS (1)..(2988)
atggcggcggaggaggtggaggcggcggcgatcgacggatccggcgaggaggcgaagcggaagagtggtaagcagaggggatcgggcgccaaggggaggcgccggaacggcgaccgggctttccgcccgccggcgatgaggccggaggaagaagggcgcggtgttgcgacgaggcccggggcgctcagggaaaggaagccgccgcccaacgccttcaacgcgccagacgatgatgaggatgtcgagaaaactgatcaacttctcgagcctctcaacaagcccaaaagacgtgatgcagggaagaagagaggacccagaaaaaagaaagtggatcaagagaacatcaaaacccacaggcataacgcaaatgcagtaaaaggcaagatgttagtcaatgataaggtttcgaagactgaaaagaagcgtaagagaggagacacaggagcggcagaaaataatgggaaagggaagaaaatgttgacaggtgaaaacgccttaatgtgtcaccaatgccagagaaatgacaaagggagagtggtctggtgcaagacttgcaacaataagcgcttttgtgtgccatgcattaatcaatggtatcctgatttgcctgaaaatgaatttgctgcaaaatgcccttattgtcgcaagaattgtaattgcaaggcatgcctgcgaatgagaggtgtcgaagagcctccaagaaaggaaatttctaaagaaaatcagattcgttatgcctgtcatgtgttacgcttgttgcgtccttggctgatagaactgcgacaggagcagatggcagagaaggaattagaggctaagatacaaggtgtttcagttgatcaaataaaggtggaacaagctgtgtgtgatctagatgagcgtgtctattgcaatagatgcagcacttctatagttgattttcatagaagctgcaagcactgtttctatgacttgtgcttgacctgctgccaggagcttcgcaaaggtgagatccctggaggagaagaggtggaaattttggatcctgaagaaagagacaaggattatgcttttggtaagattctgtcagatggtgagaaccaaagggactctttgaagtgtcgcagcgacacccaaaacagtgagtcaaacaaaggcatggcttctgacgaaaaccaaaagaaggctctgttactttggaaagcaaacagtaatggtagcataccttgcccacgaaaggaaaaggaagactgcagtttttcatctctagatctgaaatgcttgtttccagagaagttgctccctgaattagaagatagatctgagaaggtcttctggagtgaaacatttgcaaaagaactaggtagaacaagtgagctgtgcccttgttttgatcactcaggcaagataagaagtgacagcaagaaattacgtcaggctgcaaatagggaggactcgagtgataactacttatactgtccggtggccactgatatccaggacgctgacctgttgcactttcagatgcattgggcaaagggcgaaccagttgttgtttcagacactcttaagctaacttctggtcttagctgggagccgatggttatgtggcgggcagtacgagaacgaaccaaagggaaggcagaagatgagcagtttgctgtgagggcagtagattgcctcgactggtgtgaggtggaaattaacatacacatgttttttatgggatatacaaggggcagaactcatcccaggacctactggcctgagatgcttaagctaaaggactggcccccttctagctcatttgatcagcgattgcctcgccatggtgctgaatttatcagtgcattgccatttccggagtatactgatccacgatatggtccgctaaatcttgcagtgaagcttcctggtggtgtcctgaagccagatcttgggccaaaaacttacattgcctatggattttctgaagagttgggcaggggtgactctgtaaccaaacttcactgtgacatgtctgatgcagtaaacatcttaacacacacagcggaagtgccctgtgagacttatgatgctgttcagattaaaaacacgcagaaaaagatgaaaatgcaagatgacatggaaatatatgggatgatagaatcaggcagtgaactcaagccatcagcatgcccagttgaattggggaacaaagctgttggtgaagcaccaaaggcctcatgcagcaaagaaaatgttcataccttgaaagacaagtctaatggtttggatataaacgcttcaccacctgatgatgctggaggtgatgccagggatgaagcattgtcctatgaatctgtggtacatagtgatgtagctcagtgtccaaaccataaccatgagaccaataattctgatgatgcacgtattggagctcagagatgtcaaaagaaagctaaaggtcgtcctccgaagacaggttcaggggtatcagagcaccaggaaagtggtggtgctttgtgggatattttccgaagagaggactctgagaaattacaagacttccttaggaagcatgcgccagaatttcggcacatccactgcaatccagtgaaacaggttattcatccaattcatgatcaagctttctatttaactgcggagcataaaagaaagctgaaggaagaatatggtgttgaaccttggacctttgaacaaaagcttggcgaagcagttttgattcctgccggatgtcctcaccaagtcaggaatttgaagtcctgcatcaaggttgcactggactttgtttcccccgagaatgttggtgagtgtgttaggctgaccaaggaatttagacgacttccatcttcccacagggctaaagaagataagctagagatcaagaagatggctttccatgctctgaatgaagttctaaactttctggatcctccttcctcagaagggtcgaaagaagcggcggagaagcctcgaagggggcgtggtcgcccaagaaaacactag

SEQ ID NO: 256 - protein, 995 aa, Oryza sativa (japonica cultivar-group)
MAAEEVEAAAIDGSGEEAKRKSGKQRGSGAKGRRRNGDRAFRPPAMRPEEEGRGVATRPGALRERKPPPNAFNAPDDDEDVEKTDQLLEPLNKPKRRDAGKKRGPRKKKVDQENIKTHRHNANAVKGKMLVNDKVSKTEKKRKRGDTGAAENNGKGKKMLTGENALMCHQCQRNDKGRVVWCKTCNNKRFCVPCINQWYPDLPENEFAAKCPYCRKNCNCKACLRMRGVEEPPRKEISKENQIRYACHVLRLLRPWLIELRQEQMAEKELEAKIQGVSVDQIKVEQAVCDLDERVYCNRCSTSIVDFHRSCKHCFYDLCLTCCQELRKGEIPGGEEVEILDPEERDKDYAFGKILSDGENQRDSLKCRSDTQNSESNKGMASDENQKKALLLWKANSNGSIPCPRKEKEDCSFSSLDLKCLFPEKLLPELEDRSEKVFWSETFAKELGRTSELCPCFDHSGKIRSDSKKLRQAANREDSSDNYLYCPVATDIQDADLLHFQMHWAKGEPVVVSDTLKLTSGLSWEPMVMWRAVRERTKGKAEDEQFAVRAVDCLDWCEVEINIHMFFMGYTRGRTHPRTYWPEMLKLKDWPPSSSFDQRLPRHGAEFISALPFPEYTDPRYGPLNLAVKLPGGVLKPDLGPKTYIAYGFSEELGRGDSVTKLHCDMSDAVNILTHTAEVPCETYDAVQIKNTQKKMKMQDDMEIYGMIESGSELKPSACPVELGNKAVGEAPKASCSKENVHTLKDKSNGLDINASPPDDAGGDARDEALSYESVVHSDVAQCPNHNHETNNSDDARIGAQRCQKKAKGRPPKTGSGVSEHQESGGALWDIFRREDSEKLQDFLRKHAPEFRHIHCNPVKQVIHPIHDQAFYLTAEHKRKLKEEYGVEPWTFEQKLGEAVLIPAGCPHQVRNLKSCIKVALDFVSPENVGECVRLTKEFRRLPSSHRAKEDKLEIKKMAFHALNEVLNFLDPPSSEGSKEAAEKPRRGRGRPRKH

SEQ ID NO: 257 - DNA, 2853 bp, Arabidopsis thaliana
  CDS (1)..(2853)
atgcaggtcaattttgatgaaacttgtgattcagtgattagaatgaatgctaatgagcaaactcgatccgccaatggcattggcaatggcaatggtgagtctattcccgggattccagatgacttacggtgcaagagatcggatggtaaacagtggagatgcactgcaatgtccatggctgataagactgtttgtgagaagcactacatccaagcaaagaagcgggcggctaattctgctttcagggcgaaccagaagaaagcgaaaaggcgatcatcgttaggcgaaacagatacgtattcggaagggaagatggatgatttcgagttaccagtcaccagcattgaccactataataacggtcttgcctctgcttccaagagtaatggtagactagagaagagacataataaaagcctgatgcggtactcgcccgagacaccgatgatgaggagtttctctccacgtgttgcagtggatttgaatgatgacttgggtagagatgttgtaatgtttgaagagggctacagatcttataggacaccaccatctgttgctgttatggatccgacacgaaacagatcacaccaaagcaccagtcctatggaatactcagcagcaagcacagatgtgtctgcagagtctttgggggaaatctgccatcaatgccagagaaaagatagagagagaatcatttcttgcctcaaatgcaatcaaagagccttctgccacaattgtctatcggcaaggtactcggagatatcacttgaagaagtcgagaaagtttgccctgcatgtcgtggcttgtgtgattgcaaatcttgcctgcgttcagataatacaataaaggtgtggtctcgtgttatcataaagattcaaaccagtgctacctattttggggttcggatccgggaaatacccgttttggacaagttgcagtatctttatcgtctattatcagctgtcctaccagtcataaagcagatccatcttgaacaattgactattgatgaattatatatactcgtaacattttttgcggttaacactagtttgttctactctatagaagttgagattgatcttgtcagggcaagattgaaagcagatgagcagatgtgctggtacttcaacgtgtgtcggataccagttgttgactactaccgtcactgtccgaactgctcatatgacctttgcctgagatgctgtcaagatctacgggaagagtcttcagtgacgattagtgggactaaccaaaacgtacaagatagaaaaggagctcccaaactaaaactaaacttttcatacaagtttcctgagtgggaagccaacggtgatgggagcatcccttgccctcctaaggagtatggaggctgcggttcacattctttgaatcttgcccgcattttcaagatgaattgggttgcaaagcttgtgaaaaatgctgaggagattgttagtggctgcaaattatctgatcttctgaaccctgatatgtgtgattcaagattctgcaaatttgctgagagagaagagagcggtgacaactacgtgtacagcccgtcgcttgaaacgattaaaactgatggagtagctaagtttgagcaacaatgggcagagggtcggcttgttactgtgaaaatggtacttgatgactcatcttgctctagatgggatcctgagactatttggagggatatagacgagctttcggacgagaaactgagagaacatgatccattcttgaaggccattaattgcttggatggtttagaggttgatgtaagacttggggagtttacaagagcatataaagatggaaagaaccaagagacaggtcttccgctattgtggaagttaaaggactggccgagcccaagtgcttccgaggagttcattttctaccaaagacctgagtttatcagaagttttccgtttctcgagtacattcatccccggttaggccttctgaatgttgcagccaagttacctcattactcgctccaaaacgattcaggtccaaagatttatgtgtcttgtgggacgtaccaagaaatcagtgctggcgattcattgactggtattcactacaacatgcgtgacatgggaaactggttatatgttaggtcaactgagattattgtatacctattggtgcacacgtctgaagaaacaacattcgaaagggtgagaaaaacaaaacctgttccagaggaacctgaccagaagatgagcgaaaatgagtcacttcttagccctgagcagaaattaagggacggagagttacatgatctatcacttggtgaagccagtatggagaagaatgaacctgagttggcgttgactgtgaatccagagaacttaacggaaaacggtgacaacatggaatcttcttgcacatcttcatgtgcaggaggagcccagtgggatgtctttcgacgccaagacgtcccaaagttgtccgggtatttgcagagaacattccagaagcctgataatatccagactgattttgtgtcacgcccgttgtatgaaggattgttcttaaatgaacaccacaagagacaactaagagacgagtttggagttgagccatggacatttgagcaacatcgtggtgaggctatcttcattccggctggatgtccgttccaaatcactaatcttcaggtggcacttgacttcttgtgccctgaaagcgttggagagtcagcaagactagctgaagaaatccggtgtttaccaaacgaccacgaggcaaaacttcagattctagagattggaaagatatcattatacgcagctagctcagccattaaagaggttcagaaactggtcttggatccaaagtaa

SEQ ID NO: 258 - protein, 950 aa, Arabidopsis thaliana
MQVNFDETCDSVIRMNANEQTRSANGIGNGNGESIPGIPDDLRCKRSDGKQWRCTAMSMADKTVCEKHYIQAKKRAANSAFRANQKKAKRRSSLGETDTYSEGKMDDFELPVTSIDHYNNGLASASKSNGRLEKRHNKSLMRYSPETPMMRSFSPRVAVDLNDDLGRDVVMFEEGYRSYRTPPSVAVMDPTRNRSHQSTSPMEYSAASTDVSAESLGEICHQCQRKDRERIISCLKCNQRAFCHNCLSARYSEISLEEVEKVCPACRGLCDCKSCLRSDNTIKVWSRVIIKIQTSATYFGVRIREIPVLDKLQYLYRLLSAVLPVIKQIHLEQLTIDELYILVTFFAVNTSLFYSIEVEIDLVRARLKADEQMCWYFNVCRIPVVDYYRHCPNCSYDLCLRCCQDLREESSVTISGTNQNVQDRKGAPKLKLNFSYKFPEWEANGDGSIPCPPKEYGGCGSHSLNLARIFKMNWVAKLVKNAEEIVSGCKLSDLLNPDMCDSRFCKFAEREESGDNYVYSPSLETIKTDGVAKFEQQWAEGRLVTVKMVLDDSSCSRWDPETIWRDIDELSDEKLREHDPFLKAINCLDGLEVDVRLGEFTRAYKDGKNQETGLPLLWKLKDWPSPSASEEFIFYQRPEFIRSFPFLEYIHPRLGLLNVAAKLPHYSLQNDSGPKIYVSCGTYQEISAGDSLTGIHYNMRDMGNWLYVRSTEIIVYLLVHTSEETTFERVRKTKPVPEEPDQKMSENESLLSPEQKLRDGELHDLSLGEASMEKNEPELALTVNPENLTENGDNMESSCTSSCAGGAQWDVFRRQDVPKLSGYLQRTFQKPDNIQTDFVSRPLYEGLFLNEHHKRQLRDEFGVEPWTFEQHRGEAIFIPAGCPFQITNLQVALDFLCPESVGESARLAEEIRCLPNDHEAKLQILEIGKISLYAASSAIKEVQKLVLDPK

SEQ ID NO: 259 - DNA, 4890 bp, Pisum sativum
  CDS (1)..(4890)
atggacgtaggtggtgatgaagagttcaggaggtgtaatagtaatgggtctggaaacccccaatgtgaacctgagagaaagaaaaacaggaaggaaagtacttctgggagaaaaagaaaagctgaagaaaattcacaaaatggggttgttgatgacgatggaggtaaagggttgtttgatggcggtagtgggatttttgctgaaggtgaagtgaatggcggtgttgatcttggtattggttctggaaattttaatctctggcaacaaggaggagagggtcagcagcttgtttttggagagggaagtggaaatttaggtaagtttcttggggatggagttgattttttgggtgggtttgtggaggataggaacggtgttggtttaggtcagccatggagtagtgtaggtgtatttggaaatgctgctggggtttctggtgttgctaaagaagatcatggaaaatgcgttgatggtgtttgtggaaatgactcacttggttttcattctcaaggaattgaagggttgattggggaagaagaagctggttttgggaatttatatgataggagttttcaagcacttctttgtcaaggtaaggtttgtgatgaagatgtgaatttaattggtggtggaacaggctttcaagggttggttggtgaaagtgcttatgattttagaggtgaggttggtgagggtgtgggaaatttaaatgagagtggcggtaaattcggaggtgaaaaaattgttggtaatgtattagaggctcctaattcaagtaacaaggtgaaagccattggtgttgaagagggaatagaactgttacccagtggaggagtttctactcctaatgaagaggcaagaggtgaagttttgaagccattgacaaggagaggaggaaggcccaagggttctaagaataagaagaaaggggttagcttagctttggaaggaaaagcggattgtggaagtgataatgcaggagcaattgggatgggcacggttgaagttttagagaatgaaaaatcagtgttttctggtaagtatgatggggaaggtgtggacatgggtgagattgctaggacaagggagtgtagtcaactagaagatttgaagtatacaggggagattgtttttgcggccggttatgaagttgccggggttagtgagatttcaagaccatgcaagcttgctccagagtcaaagggtctggtaaacaaagagaagaatgttgaggaggttagtactagcagtgaagttgctgttgagatagcaaggcctaagaagcgtggtcggcgaaagggttcaacaaataaaatggtaacctatagtgcttgtagcaaagaaggagctgatgacattgaaacacaaggttcggaagaaaaaatgctgatcgttccgtatcagaaaggtgcagatgggtttgcaagcccaactaataaacttggtccagcatcgtctacaaggaataaattgagaagtattgaatttgagggttataagaatccagaaatgtctagtaatgttcgtcttgaagatgatggaactccaagtggtttggagattactacactggctcctttatgtgagatggaaaaagggatgccttttgaatctgccaaacatattgaaaacttaactacgccgccgataattaagcgtggtcggcctaagggctcaaagaacaagaagaaagagctagccgatcaggagcacataggccatgaaggtgacatcattaagctaattggtgtggaaaattacgaagccactgctgttagtgtcggggatcaggaattggtggtccaaacccttggtcaagatgaggttcagaatgttaaaccaaagatcggtagaccaaagggatctaaaaataagaagaaaaatattgacggtgaagctgaaaacaagttacatgagaaaaaaaaacgtggtaggcctaagggttccggcaaaaagcaaaaggagaacgcttctcgattggatgcagagattgaatgtgagaataatacacgtgtctatgggattttgagtacgactatacaacataaacacatacatgaggaatccgttttactgctagaagatcaagtatataagaaagacgatgcagattttgttcctgagtgctcaaaggagtctggaattgaaaagatagcaaagggattggtgagtgaatccgacaatctccataagactcaggatgtcgaagtgggagatattttttatgaaaaggaagtgaaagaaactagagaccatggattggaatctgacaatgtccataagactcaggatgtcgaaatgggagatattttttatgaaaaggaagtgaaagaaactagagaccatggattggaatcttcagatatgatgggtgactgtgaggccaaaaaggagccaaggaattcaaggtgccatcaatgctggaagaagagtagaactggtcttgttgtttgttccaagtgcaaaagaaagaaatattgctacgagtgcatagcaaaatggtaccaagataaaactagagaggagatagagactgcttgtcccttttgtctggattattgcaattgccgaatgtgcctgaagaaagctatatctacaatgaatggaaatgatgaagcagatagagatgtcaaattacggaaactgctttacttgcttaacaaaactttgccattactccaagatatccaacgagagcagagatatgaattggaagtagaagcaagcatgcacggttcacagttggtggaagaggaggatattcggaaggcagaagttgacgacgatgatcgagtttattgtgacaactgcaatacatccattgtcaatttccacagaagttgttccaatcctaattgtcagtatgatctctgtcttacttgttgcactgaactaagaattggagttcattgtaaagatattcctgctagtggtaatgaggaaatggtcgacgcgccacctgaatccattccttggagagcagagacaaatggtagtattccctgccctccgaaagctagaggaggttgcggtattgctaccctctcactgaggcgcctattcgaagctaattggattgacaagttgactagaggcgtggaggaacttaccgtaaaatatcagccacctattgctgatctttctctaggatgttcagagtgccgtagttttgaggaagacgtagcacaaaattctgcaaggaaggcagcttcaagagaaaccggttatgacaactttttgtactgtccggatgctgttgaaatcggagaaacaacatttcagcatttccaaagacactggataaggggtgaacctgttattgttaggaatgtgtataaaaaggccagtggtcttagctgggacccaatggtgatgtggagagcttttatgggggcaagaaaaatattaaaagaggatgccgttaattttaaagccattgattgcttggattggtgcgaggtagaaattaacgcctttcagttcttcaaaggctacttggaaggtcgtagatacagaaatggatggccagctatgctgaagctaaaggattggcctccatcaaatttttttgaagagtgtttgccaaggcatggtgctgagtttatagcaatgcttccttttagtgattatacacatcccaaatccggtattttaaacctggccacaaagctccctgctgttttgaagcctgatttgggtcctaaaacatacattgcttatggaacttcagacgagttgagtagaggtgattctgtgacaaaattacactgtgacatttcagatgcggtcaatattctgacacatactgctgaggtaaagccaccaccatggcaatccagaatcataaaaaagttacaaaaaaagtatgaagttgaagatatgcgtgagctctacagtcatgacaaaacggcagttggtttacctagaaaaagaggcagaaagcgtcgcgtaggttttggcgtggatcctaaaatttctgaaaaagaagacactaatggtagagactcaaccttacaaggaagtcaaggaaaagaagagaaattagatgaacaagaatcctcagaacccaccaaaataaaattcgatttaaatgccagcgagcaggaaatctccaattcaccaaggtttcagcaatttgacctcaatagtcatgactccagtttcttggttcctggaaacgattgtgagtcaatgcattatgataacgtgcaacaatgctcatctcaaggtgatgaatcttataaaggaatttcatcagtgattgatgatcaaccttgtagtggaacaaaagaaacaaaaattgtcaacaaattaaattcttcagacgacttctgtcagatggtcgagactaacaatatagattcagtcgaaaaggatagtttgagtaataattcatgtcaagatgatgttcatttggggactcaaaatgggagtgctgtatgggacatattccgcaggcatgatgttcccaagctaacagaatatctaaagaaacaccatagagagtttcgccacataattaatcttccggtgaattctgtgattcatcccattcatgaccagatcctttatttaaatgagaagcataaaaagcaactaaagctagaatatggtgttgaaccgtggacgttcgagcaacatcttggggaggctgttttcatacctgcaggatgcccacatcaagtgagaaatagaaagtcttgcataaaagtggctatggatttcgtttcgcctgagaatgttcaagaatgtgttcaattgacagaagagtttcgattacttcctaaaaaccatagatctaaggaagataaattggagataaagaagatggcactttatgccgctgatgttgctgttgctgaagccaatgaactcatgggagctaaatga

SEQ ID NO: 260 - protein, 1629 aa, Pisum sativum
MDVGGDEEFRRCNSNGSGNPQCEPERKKNRKESTSGRKRKAEENSQNGVVDDDGGKGLFDGGSGIFAEGEVNGGVDLGIGSGNFNLWQQGGEGQQLVFGEGSGNLGKFLGDGVDFLGGFVEDRNGVGLGQPWSSVGVFGNAAGVSGVAKEDHGKCVDGVCGNDSLGFHSQGIEGLIGEEEAGFGNLYDRSFQALLCQGKVCDEDVNLIGGGTGFQGLVGESAYDFRGEVGEGVGNLNESGGKFGGEKIVGNVLEAPNSSNKVKAIGVEEGIELLPSGGVSTPNEEARGEVLKPLTRRGGRPKGSKNKKKGVSLALEGKADCGSDNAGAIGMGTVEVLENEKSVFSGKYDGEGVDMGEIARTRECSQLEDLKYTGEIVFAAGYEVAGVSEISRPCKLAPESKGLVNKEKNVEEVSTSSEVAVEIARPKKRGRRKGSTNKMVTYSACSKEGADDIETQGSEEKMLIVPYQKGADGFASPTNKLGPASSTRNKLRSIEFEGYKNPEMSSNVRLEDDGTPSGLEITTLAPLCEMEKGMPFESAKHIENLTTPPIIKRGRPKGSKNKKKELADQEHIGHEGDIIKLIGVENYEATAVSVGDQELVVQTLGQDEVQNVKPKIGRPKGSKNKKKNIDGEAENKLHEKKKRGRPKGSGKKQKENASRLDAEIECENNTRVYGILSTTIQHKHIHEESVLLLEDQVYKKDDADFVPECSKESGIEKIAKGLVSESDNLHKTQDVEVGDIFYEKEVKETRDHGLESDNVHKTQDVEMGDIFYEKEVKETRDHGLESSDMMGDCEAKKEPRNSRCHQCWKKSRTGLVVCSKCKRKKYCYECIAKWYQDKTREEIETACPFCLDYCNCRMCLKKAISTMNGNDEADRDVKLRKLLYLLNKTLPLLQDIQREQRYELEVEASMHGSQLVEEEDIRKAEVDDDDRVYCDNCNTSIVNFHRSCSNPNCQYDLCLTCCTELRIGVHCKDIPASGNEEMVDAPPESIPWRAETNGSIPCPPKARGGCGIATLSLRRLFEANWIDKLTRGVEELTVKYQPPIADLSLGCSECRSFEEDVAQNSARKAASRETGYDNFLYCPDAVEIGETTFQHFQRHWIRGEPVIVRNVYKKASGLSWDPMVMWRAFMGARKILKEDAVNFKAIDCLDWCEVEINAFQFFKGYLEGRRYRNGWPAMLKLKDWPPSNFFEECLPRHGAEFIAMLPFSDYTHPKSGILNLATKLPAVLKPDLGPKTYIAYGTSDELSRGDSVTKLHCDISDAVNILTHTAEVKPPPWQSRIIKKLQKKYEVEDMRELYSHDKTAVGLPRKRGRKRRVGFGVDPKISEKEDTNGRDSTLQGSQGKEEKLDEQESSEPTKIKFDLNASEQEISNSPRFQQFDLNSHDSSFLVPGNDCESMHYDNVQQCSSQGDESYKGISSVIDDQPCSGTKETKIVNKLNSSDDFCQMVETNNIDSVEKDSLSNNSCQDDVHLGTQNGSAVWDIFRRHDVPKLTEYLKKHHREFRHIINLPVNSVIHPIHDQILYLNEKHKKQLKLEYGVEPWTFEQHLGEAVFIPAGCPHQVRNRKSCIKVAMDFVSPENVQECVQLTEEFRLLPKNHRSKEDKLEIKKMALYAADVAVAEANELMGAK

SEQ ID NO: 261 - DNA, 2721 bp, Arabidopsis thaliana
  CDS (1)..(2721)
atggattctggagttaaattggagcatatgaattgtttccaattatcttatcaatattcgtggacgactaggaagaagagaactctgaaaccattcatgtcaaaaggttctagccctagtagtagtagtgatagtaggaaacggaagctttcgagagctgaagatagcgatgattcagcggttaaacggaatgcgaaacgaaggagaaagatatgcaaagtagaagaatattatgaagatgatgattgcatattaagtgattgggttcagaggaatactgcgaaaaggattgataagcgcaacgaagaagttgaagttatggttaagatagagtcaggtgatgattgcacaataggtaagtggttttctgatgttagtagtaaaaggaaagataaacgacaagtagaagttgatgaagatgaggaatgggaagaagaagttacactgtgttctaagatcaaggcaacgtcgtcgcgaagcagaacccatagtttaagtgctaacagtccagaaaatgttacagatgttattagtccttgtcgttcacggtctccagcttctaatgtatcagattccattcagaaaaatgactgcaccagtagtagaaaacagagtggcccaatttgtcatcagtgcttgaaaggggaaaggataacacttctcatttgtagtgaatgtgagaagacaatgttttgtcttcaatgtataaggaaatggtatccaaatctatctgaggatgatgttgttgagaaatgtcctttatgccgtcaaaattgtaattgtagcaaatgcttgcatttgaatggtttaattgagacatcgaagagggaactcgcgaaatctgaaagacgtcatcatctccagtatttgattacgttgatgcttccttttctgaataagttatccatattccagaagctagagattgaatttgaggcaactgttcaaggaaaactgccttctgaagttgaaataactgcggctataagctacactgatgaacgtgtatactgtgatcattgtgcaacttcaattgttgacttgcatcgaagctgtccaaagtgctcttatgaactttgtttgaagtgctgtcaagagattcgtgaaggatcgctttctgaacgccctgaaatgaagttccattatgttgatagaggacatcgatatatgcatggtttagatgctgcggaaccgagcttgtcttccacttttgaagacgaagaagctaacccatctgacgctaagtggagccttggtgaaaatggaagcatcacttgtgcaccagaaaagctaggtggttgtggtgaacggatgctagagcttaggcggatcctaccactcacgtggatgtcagatttagagcacaaagcagagactttcttatcatcatacaatataagccctagaatgttgaactgtaggtgttcttctttggagacagagctgacaaggaaatcagcttcgaggacaacatcaagtgacaactaccttttctgtcctgaatctctcggtgtcttgaaggaagaagagcttcttcattttcaagagcattgggcaaaaggcgaaccagtaatcgttaggaacgctcttgacaacacacctggtttaagctgggagccgatggttatgtggcgggctttatgcgaaaatgtgaattcaacatcaagctctgagatgtcccaagtcaaagcaattgattgcttagctaattgtgaggtggagatcaatactcgtcagttctttgaaggttatagcaaaggaagaacatatgaaaatttctggcctgagatgttgaagcttaaggactggcctccttctgataagtttgaagatcttctacctcgtcactgtgatgagttcatatccgcgttacctttccaggaatatagtgatcctagaactggaattcttaacattgcaacaaagcttcctgaaggatttatcaaaccagatttaggtccaaaaacttacatcgcctatgggattccagatgagcttggtagaggcgattccgtgactaagcttcactgcgatatgtcagacgcggtgaatattctaacgcatacggccgaagtgaccctaagtcaagaacaaatatcctcagtcaaagcactgaaacagaaacacaagttacagaataaggtcgataaacagagtactgaagactgtaacgaaaaggaagaagaagaagaagaagaattgaacatgccagagatttcgagcaatgaaaatgaagaaacgggcagtgctctttgggacatatttaggagagaagacgttcccaagttagaagagtatctaagaaagcattgcaaagaatttagacacacttattgtagtccagttacaaaggtaacaacacccacctgcatcaattttatgacgaatttatttccggtactgacggtttcttcttttcaggtttatcatccgatacatgaccaatcatgctatttaaccttagagcacaaaagaaaactcaaggcggaatatgggatcgagccatggacatttgtgcaaaagctaggtgaagcggtgtttattcccgcgggttgtcctcatcaagttcggaatctaaagtcgtgcacaaaagtcgcagttgactttgtgtcaccagagaacatccatgagtgtctgcgtttgaccgaagagtttcgccaacttcccaaaaaccacaaggccagagaggacaaactcgaggcaagtcttttatctctttga

SEQ ID NO: 262 - protein, 906 aa, Arabidopsis thaliana
MDSGVKLEHMNCFQLSYQYSWTTRKKRTLKPFMSKGSSPSSSSDSRKRKLSRAEDSDDSAVKRNAKRRRKICKVEEYYEDDDCILSDWVQRNTAKRIDKRNEEVEVMVKIESGDDCTIGKWFSDVSSKRKDKRQVEVDEDEEWEEEVTLCSKIKATSSRSRTHSLSANSPENVTDVISPCRSRSPASNVSDSIQKNDCTSSRKQSGPICHQCLKGERITLLICSECEKTMFCLQCIRKWYPNLSEDDVVEKCPLCRQNCNCSKCLHLNGLIETSKRELAKSERRHHLQYLITLMLPFLNKLSIFQKLEIEFEATVQGKLPSEVEITAAISYTDERVYCDHCATSIVDLHRSCPKCSYELCLKCCQEIREGSLSERPEMKFHYVDRGHRYMHGLDAAEPSLSSTFEDEEANPSDAKWSLGENGSITCAPEKLGGCGERMLELRRILPLTWMSDLEHKAETFLSSYNISPRMLNCRCSSLETELTRKSASRTTSSDNYLFCPESLGVLKEEELLHFQEHWAKGEPVIVRNALDNTPGLSWEPMVMWRALCENVNSTSSSEMSQVKAIDCLANCEVEINTRQFFEGYSKGRTYENFWPEMLKLKDWPPSDKFEDLLPRHCDEFISALPFQEYSDPRTGILNIATKLPEGFIKPDLGPKTYIAYGIPDELGRGDSVTKLHCDMSDAVNILTHTAEVTLSQEQISSVKALKQKHKLQNKVDKQSTEDCNEKEEEEEEELNMPEISSNENEETGSALWDIFRREDVPKLEEYLRKHCKEFRHTYCSPVTKVTTPTCINFMTNLFPVLTVSSFQVYHPIHDQSCYLTLEHKRKLKAEYGIEPWTFVQKLGEAVFIPAGCPHQVRNLKSCTKVAVDFVSPENIHECLRLTEEFRQLPKNHKAREDKLEASLLSL

SEQ ID NO: 263 - DNA, 2556 bp, Arabidopsis thaliana
  CDS (1)..(2556)
atggagggtgaagttgctactaacggagtgattctcaagcataatggtgtaaaggatatttctttagaaacttgttggccagagaagaagaaaccggttgaggcaacgagtcttagcagtggttcatcagacatagaagaagagattagtgtggaatgtcctaagcgagtggctaatcaaagacggaaacggtctaaagctgatgagattaaaacgaaatcttcaagaaagaggaaatgtgatgatgagaacaagtgtgaagagaatgagaagaagcagaggagctctgttaaaaagagagcaactacatggaaagaagaagaagttgttgttgatgatgaaaagaaatgcgaacaacaactccaactagttccttccagcaaggcaacatctcgaagcaggagcaagaaatcagtcagtgtggatacttggttggttaacaacgagattgatgttagcgctttgagttcgcgttctgagtctgaactttcggattcttatctgaaaaccgagtactttaatgactgcagaagcatgacaaggagtttaaaggcaaatttgggagagcttgcaatttgccatcaatgctctaaaggggaaagaagatatcttttcatttgcaccttttgtgaagtgaggttgtattgttttccatgcataaagaaatggtatccccatttgtccacggatgatatccttgaaaaatgtcccttttgccgaggaacttgcaactgctgcacatgtttgcactctagtggtttaatcgagacatctaagagaaagctcgataaatacgaaagattttatcatcttcgcttcttgattgtggcgatgcttcctttcctgaaaaagttatgcaaagcacaagatcaagaaatcgaaaccgaggctaaggttcaagattcaatggcttctcaagttgatatatccgagagtctatgctcaaatgaagagcgtgtcttctgtaaccactgtgcaacatcaattgttgacttgcatcgaagctgtccaaagtgttcatatgaattgtgtctgaactgttgccaagagatccgtggagaaccgagctcttcttctgtttccgaggatgaaactaaaactccatccatcaagtggaatgctgatgaaaatggaagcatacggtgtgcgccaaaagagctaggaggttgcggggactctgtgctggagcttaagcgaatcttaccagtgacttggatgtcagatttggagcaaaaggcagaaacattcttagcctcttatagtatcaaaccgccaatgtcatattgtagatgttcttctgatatgagtagtatgaagaggaaggcagcttcgagggacggatctagtgacaattacctttattctcctgattctttggatgtcctgaagcaagaagaacttctgcatttccaagagcattggtccaaaggtgaaccagtgattgttcgaaatgctcttaacaacacagctggtttaagctgggagccaatggtgatgtggcgggctttatgtgagaatgttgattcagcaattagctctaatatgtctgatgtcaaagctatcgattgtttagctaattgtgagataaatactctatgtttctttgaaggatatagcaaaggaagaacatatgaaaacttctggcctgagatgctgaagctgaaggattggcctccttcagacaagtttgaaaaccttttacctcgtcactgcgatgagttcatttccgcattaccatttcaagaatacagcgatcctagatcaggaattctcaacattgctacaaaacttcctgaaggacttcttaaaccagatcttggtccaaaaacttatgttgcatatgggacttcagatgagctcggtagaggagattcagtcactaagcttcactgtgatatgtcagatgctgttaatattctgatgcatactgctgaagtaacactaagtgaggagcaaaggtctgcaattgcagatttgaaacagaaacataagcaacagaatgagaaagagcttcaggagcaaaatggtttagaggaagaagaggttgtgagtgatgagattgtggtttatgatgaaacaagtggtgcactttgggacatctttaaaagagaagatgttcctaagcttgaagagtatctaaggaagcattgcatagaattcagacatacttattgctctcgtgttacaaaggtgtatcatccaatacatgatcagtcatatttcttaaccgtggagcataaaagaaaactcaaggcagaatttggtatggttacttggattgagccatggacatttgtgcaaaagctaggagaagcagtgtttattccagcaggttgtcctcatcaagttcggaatctcaagtcgtgcacaaaggtagctgttgattttgtttcccctgaaaacatcgatgagtgtctccgtttgactgatgagtttcgacaactccctaagaaccataaagccagagaagacaaacttgagataaaaaagatggtgatctatgcagttgaacaagctctgaaagaagtggagacattattgctagatcgcagctaa

SEQ ID NO: 264 - protein, 851 aa, Arabidopsis thaliana
MEGEVATNGVILKHNGVKDISLETCWPEKKKPVEATSLSSGSSDIEEEISVECPKRVANQRRKRSKADEIKTKSSRKRKCDDENKCEENEKKQRSSVKKRATTWKEEEVVVDDEKKCEQQLQLVPSSKATSRSRSKKSVSVDTWLVNNEIDVSALSSRSESELSDSYLKTEYFNDCRSMTRSLKANLGELAICHQCSKGERRYLFICTFCEVRLYCFPCIKKWYPHLSTDDILEKCPFCRGTCNCCTCLHSSGLIETSKRKLDKYERFYHLRFLIVAMLPFLKKLCKAQDQEIETEAKVQDSMASQVDISESLCSNEERVFCNHCATSIVDLHRSCPKCSYELCLNCCQEIRGEPSSSSVSEDETKTPSIKWNADENGSIRCAPKELGGCGDSVLELKRILPVTWMSDLEQKAETFLASYSIKPPMSYCRCSSDMSSMKRKAASRDGSSDNYLYSPDSLDVLKQEELLHFQEHWSKGEPVIVRNALNNTAGLSWEPMVMWRALCENVDSAISSNMSDVKAIDCLANCEINTLCFFEGYSKGRTYENFWPEMLKLKDWPPSDKFENLLPRHCDEFISALPFQEYSDPRSGILNIATKLPEGLLKPDLGPKTYVAYGTSDELGRGDSVTKLHCDMSDAVNILMHTAEVTLSEEQRSAIADLKQKHKQQNEKELQEQNGLEEEEVVSDEIVVYDETSGALWDIFKREDVPKLEEYLRKHCIEFRHTYCSRVTKVYHPIHDQSYFLTVEHKRKLKAEFGMVTWIEPWTFVQKLGEAVFIPAGCPHQVRNLKSCTKVAVDFVSPENIDECLRLTDEFRQLPKNHKAREDKLEIKKMVIYAVEQALKEVETLLLDRS

SEQ ID NO: 265 - DNA, 5106 bp, Medicago truncatula
  CDS (1)..(5106)
atggatgaaactggtgatgacgagtctaggaggtgcagtagaaacgggtcaggtggatggaggtgcaaagagcaagctttacctggaaaaacccattgtgaaaggcatcatgagtattacaaaagcaggaattcgagtagttttgttgaaaagaatggtggaataagaaatggggttgttgttgatgatcatgataatggaggtaaagggttgtttggtggtgatgatcatggtgttgttgagggatttggaggggtttttggtgatgttgaagtgaatggtggtgttaatgctggtattggccgtgaaaggtttaatctttggcaacaaggggatggtcaacaaggtgggaggtttgagcaagccagtgggaatttaggtcagtttttgggtgatggagttgaatttgttggtgggtttgttgaggataggaatagggctgttggtttaggtcagcaatggggtggtgtaggtgtatttggaaatggtggtggtgtttctggtgttggtaaagatgatcatggaaatggtgttgatggtgtttgtggaaatgattcacctggttttggttctgatggaattaatgggttgattggtgaagggggttgttttgggaatttgtatgataggagttttcaagctcttctttctcaaggtagggtttgtgatgaagatgtgaatttgactggtggtggaactagctttcaagggttgggtggtgaaagtgcttatgattttagaggtgtgggaaatctaagtcagtgtggtaagtttgaaggtgaaaaaaatgttggtagtatattaacagttcccgagtcaagtaacaagatgggagcatttggtgtggaagagggaatggaaatgttattaagtggaggagtttccatcaatgaggaggcaaggggtgaagccttgaagccattggctaagagaggtaggcctaagggttctaagaataagattaagaagaaagaggttgacttagtcactaatggagaaactgtttgtggaagtgctaatgttggaacaactgttgaaattctagagactgagaaatcagtgttttctggtaaggctgatcaggaaggcgtggacatgggcgacattgcaaggacaaagaagcgtggtcaaccggaagattggaagcgtggaaggcatattattttggcagttggttatgaaattgatggggttggtgagattacaggaccaatggagcgtggtagaaaatcaaagggttcagtaaacgaagagaagaatgttgaggaggttagcagtgaagttgctggtgccggtgagattgcaaggcctaagaagcttggtcggatggaagcatcaaaatgcgggaaggagattgtcgtagaggttagtaatgatgttggtggtgagattgtgaggcgaaagaagcgtggtcgaccaaaaggttcaaaatgtggaaaggagattgtcctagaggttaataatgaagttgttggtgccgaggttatcattgaagttgctggtgctggcgagattgcaaggcctaagaagcttggtcggctggaagggtcaaaatgtgggaaggagattgtcgtggaggttagtaatgatgttgctggtgagattgtgaggccaaagaagcgtggtcgaccaaaaggttcaaaatgtggaaaggagattgtggtagaggttaatcatgaagttgctggtgccggtgagattgcaaggtctaagaagcgtggtcgaccaaaaggttataagtgtcaaaaggagattgttattaagcgtggtcgacctaagggcacaaagaacaagaagaaaatactagaagatcaggaattgcatgtccaaacccttgttcaggatgaggttcaaaatgttaaaccaaagctaggtcgaccaaaggggtctaaaaataagaagaaaaatattgccggtgaagatggaaacaagttacataaggagaaaaaaaggcgtggttggccaaaaggtttttgcttaaagccaaaggagattgctgctcgattggatgagaagattgaaaggcgtggtaggccaaagggttctggcatgaagccaaaggagactgctgttcaattggatgcgaagattgaaaggcgtggtaggccaaagggtgctggcaaaaagccaaaagagattgttgttcgattggatacgaagattgaaaggcgtggtaggccaaagggttcagggaaaaagcaaaaggaggttgcatctcaattggctttacagattgaaagtcagaagagtactcgtgttgatggagctttgagtacgattgtgccacataagcatatacaagaggaatccatttcaccgctaaaagatccagtaaataaggaggaaaagtcagattttgtccttgagtgctcaaaggattctggaattgaaaagataacaaaagggttgatgagcaaatctggcgatgtccataagaggtgcagtgaaagattaagaacattgctaaccgaccacaagaattctcaggatgttgaagtggaagaaactttttgtgaaaatgaggtggaagaagctatagatcatgaattggaatcttcagatttgatgggtgaaccagagaccaaaaaggagcctaggaatttaaggtgccatcagtgctggaagaaaagtaggactggaattgttgtttgtaccaagtgcaaaagaaaaaaatattgttatgagtgcatagcaaaatggtaccaagataaaactagagaggagatagagactgcttgtcccttttgtcttgattattgcaattgccgactgtgcttgaagaaaactatatcgacgatgaatgggaatggcgaagcagatgcagatgtcaaattacagaaattgttttacttgcttaagaaaactctgcctttactccaacatatccaacgggagcagaaatcagagttggaagtagaagcaagcattcacggttccctgatggtggaagagaaggatattctgcaggcagcagttgacgatgatgatcgagtttattgtgacaactgcaatacgtccattgtcaatttccacagaagttgtgtcaatccgtattgtcggtacgacctctgtctcacttgttgcacagaacttagaaatggagttcattccaaagatattcctgctagtggtggtaatgaggaaatggtcaatacaccaccagaaactattgcttggagagcagagacaaatggcagcattccttgtcctccaaaagctagaggaggttgtggtactgctaccctttcgctgaggcgcctattcaaagctaattggatcgaaaaattgactagggatgcggaggaacttaccatcaaatatcagccacctattgttgatctttctttagaatgttcagagtgtcgtagttttgaggaagatgcagcacataattctgcaaggaaggcagcttctagagaaaccggtcatgacaacttattgtactgccctgatgccattgaaatcggagacacggaatttgaccatttccaaagacactggataagaggtgaacctgttattgttaggaacgtgtacaaaaagggtagtggccttagctgggacccaatggtgatgtggagagcttttagattggcaaagaacatattaaaagatgaggcagacacttttaaagccattgactgcttagattggtgcgaggtacaagttaacgcctttcagttcttcaaaggctacttgacagggcgtaggtacagaaatggatggccggaaatgttgaagctaaaggattggcctccaacaaattttttcgaagattgtttgccaaggcatggtgctgagtttacagcgatgcttccttttagtgattacacacatccgaaatctggtattttaaaccttgccacaaagctgcctactgttttgaagccagatttgggccctaaaacatacattgcttatggagctttagaagagttgagtagaggtgattctgtgacaaaattacattgtgacatttcagatgcggtcaatattctgacgcacacagctgacgtaaagacaccagcgtggcaatccaaaatcataaaaaagttaaagaagaaatatgaagttgaagatatgcgagagctctatggtctggacagtaaggcagctggttcgcgtggaagaaaacgtaaaaagcgtcgcgtaggtgttaccgtggatcttaaaatatctgaaaaagaagacattaatggtagagactcaaccttgcttgaaagtcaagaaaaagaagacaaacttgatagagaagcttgtgttcaagagttctctgaatctaccaaaagtaaattagatttaaatgtgagcaatcaggaagtcatcgattcaccaaggtttcagcaatttgatctcaatagtcttgattccaatttcttggttcctagaaatgactgcgagtcgatgctttatgataatgtggaacaacggtgctcacgaccacgcgatggatcttgtaaaggaaatacatccgtgattgataatcaaccttgtggtggaacaaaagaaacaacatttgtcaatggattagattcttcagacatttcctcttcggatattgagactgacaaaatagagtctgttgaaaatgagatgccgagtaataatttatgtgggaatgatgttcatttggagactcaatatgggagtgctgtgtgggacatattccgtaggcaagatgtaccaaaactaacagagtacctaaataaacaccatagagagtttcgccacataactagtcttccagtgaattttgtgattcatcccattcatgaccagcacttttatttgaatgagaaacataaaaagcagctaaagctagaatatggtgttgaaccctggacgttcgagcaacatctcggggaagctgttttcatacctgcaggatgccctcatcaagtgagaaatagaaagccttgcatcaaagtggctatggactttgtttcgcccgagaatgttaatgagtgtgttcgattgacagaggaattccggttacttccaaaataccatagatctaaggaagataaattagagattaagaagatggcactctatgctgccgatgttgctatcgctgaagccactaaactcgtgggagctaaataa

SEQ ID NO: 266 - protein, 1701 aa, Medicago truncatula
MDETGDDESRRCSRNGSGGWRCKEQALPGKTHCERHHEYYKSRNSSSFVEKNGGIRNGVVVDDHDNGGKGLFGGDDHGVVEGFGGVFGDVEVNGGVNAGIGRERFNLWQQGDGQQGGRFEQASGNLGQFLGDGVEFVGGFVEDRNRAVGLGQQWGGVGVFGNGGGVSGVGKDDHGNGVDGVCGNDSPGFGSDGINGLIGEGGCFGNLYDRSFQALLSQGRVCDEDVNLTGGGTSFQGLGGESAYDFRGVGNLSQCGKFEGEKNVGSILTVPESSNKMGAFGVEEGMEMLLSGGVSINEEARGEALKPLAKRGRPKGSKNKIKKKEVDLVTNGETVCGSANVGTTVEILETEKSVFSGKADQEGVDMGDIARTKKRGQPEDWKRGRHIILAVGYEIDGVGEITGPMERGRKSKGSVNEEKNVEEVSSEVAGAGEIARPKKLGRMEASKCGKEIVVEVSNDVGGEIVRRKKRGRPKGSKCGKEIVLEVNNEVVGAEVIIEVAGAGEIARPKKLGRLEGSKCGKEIVVEVSNDVAGEIVRPKKRGRPKGSKCGKEIVVEVNHEVAGAGEIARSKKRGRPKGYKCQKEIVIKRGRPKGTKNKKKILEDQELHVQTLVQDEVQNVKPKLGRPKGSKNKKKNIAGEDGNKLHKEKKRRGWPKGFCLKPKEIAARLDEKIERRGRPKGSGMKPKETAVQLDAKIERRGRPKGAGKKPKEIVVRLDTKIERRGRPKGSGKKQKEVASQLALQIESQKSTRVDGALSTIVPHKHIQEESISPLKDPVNKEEKSDFVLECSKDSGIEKITKGLMSKSGDVHKRCSERLRTLLTDHKNSQDVEVEETFCENEVEEAIDHELESSDLMGEPETKKEPRNLRCHQCWKKSRTGIVVCTKCKRKKYCYECIAKWYQDKTREEIETACPFCLDYCNCRLCLKKTISTMNGNGEADADVKLQKLFYLLKKTLPLLQHIQREQKSELEVEASIHGSLMVEEKDILQAAVDDDDRVYCDNCNTSIVNFHRSCVNPYCRYDLCLTCCTELRNGVHSKDIPASGGNEEMVNTPPETIAWRAETNGSIPCPPKARGGCGTATLSLRRLFKANWIEKLTRDAEELTIKYQPPIVDLSLECSECRSFEEDAAHNSARKAASRETGHDNLLYCPDAIEIGDTEFDHFQRHWIRGEPVIVRNVYKKGSGLSWDPMVMWRAFRLAKNILKDEADTFKAIDCLDWCEVQVNAFQFFKGYLTGRRYRNGWPEMLKLKDWPPTNFFEDCLPRHGAEFTAMLPFSDYTHPKSGILNLATKLPTVLKPDLGPKTYIAYGALEELSRGDSVTKLHCDISDAVNILTHTADVKTPAWQSKIIKKLKKKYEVEDMRELYGLDSKAAGSRGRKRKKRRVGVTVDLKISEKEDINGRDSTLLESQEKEDKLDREACVQEFSESTKSKLDLNVSNQEVIDSPRFQQFDLNSLDSNFLVPRNDCESMLYDNVEQRCSRPRDGSCKGNTSVIDNQPCGGTKETTFVNGLDSSDISSSDIETDKIESVENEMPSNNLCGNDVHLETQYGSAVWDIFRRQDVPKLTEYLNKHHREFRHITSLPVNFVIHPIHDQHFYLNEKHKKQLKLEYGVEPWTFEQHLGEAVFIPAGCPHQVRNRKPCIKVAMDFVSPENVNECVRLTEEFRLLPKYHRSKEDKLEIKKMALYAADVAIAEATKLVGAK

SEQ ID NO: 267 - DNA, 4926 bp, Vicia sativa
  CDS (1)..(4926)
atggatgtgggtggtggtgatgaagagtttaggaggtgtaatagaaatgggtctgggcggaggtgtaaagacggagctttacctggaaatctccaatgtgaaaagcatcagttgtgtgcggttgagagaaagaagaataggaaggagactagttctgggaggaaaagaaaagctgaagaaagtttattggatgaggatgatggaggtaatggtttgtttgctggtggtgctggtggtgctggtggtgctggtggtggggtttttgtagaaggtggagttaatgttggtattggttctgagagttttaatctctggcaagaaggtgagggtcaacaggttgaggtttttggagagggaagtgggaatttaggtaagtttcttggggatggagttgagtttttaggtgggtttgttgaggataggaatgttgttggtttaggtcagccatggagtagtgtaggtgtatttgggaatgctggtggggttgctggtgttgggaaagaagatcatggaagccgcgttgatggtgtttgtggaaatgactcacttgcttttcattctcaaggaattgaagggttgattggcgaagaagaaggtggttttgggaatttatatgataggagttttcaagcacttctttgtcaagggaaggtttgtgatgaagatgtgaatttaattggcggtgcaacaggctttcaagggttggttggtgagagtgcttttaattttagtggccaggatggtgagggtgtgggaaatctaagtcagcatgacggtaaattcgatggtgaaaaaaatgttggtaatatattagaggctcctagttcaagtaacaagatgaaagccattggtgttgaagagggagtggaactgttacctagtgcaggagtttctgctaatgaagaggcaagaggtgaagttttgaagccattgactagtagaggaggaaggccgaagggttctaagaataagaagaagaaaggggttagcttagttttggacggagaagcggtttgtggaagtgataatgcaggaacaattgggatgggtacggttgaagttttagagaatgaaaaatcagtgttttgtggtaagtctgatggggaaggtgtggacacgggtgagattgcaaggacaagggagtgtagtccaccggaaaatcagaagtctacaacggagattttcttggcgcatggttatgaagttgccggggttggtgagatttcaagaccgctaaacaaagagaagaatgttgaggaggttagtagtgaagttgctgttgagatatcaaggtctaagaagcgtggtcggccaaagggttcaacaaagaaaaaggtaacctgtagtgcttctaggaaaggagctggtgacattgcaacacaaggttcagaagaaaaaatgctgatcgttccgtatcagaaagatgcagatgagtttgcaagcctaactagtaaacttggtccagcattgtcaacaaggaataaattgagaagtactgaatttgagggttgtaagcatccaggaatgtctagtaatgttcgtcttgaagaaaatgatggaactgcaagtggtttggagattactacattggctcctttacgtgaggcggaaaaagggatgccttttgaatctgccaaacatattgaaaacttaactacgcctccgatagttaagcgtggtcgacctaagggctcaaagaacaagaagaaaacgctagccgatcaggagcacataggccatggaggtgacatcattaagctaattggtatggaaagttccgaagctgctgttagtgtcggggatcaggaattggtggttcaacccttggtcaaggtgaggttcagaatgttaaacccaaagatgggtcgaccaaagggatctaaaaataagaagaaaaatgttgatggtgaagctgaaaacgggttacataaggagggaaaaaaacgtggtaggcctaagggttctgtcaataaccccaaggagactggaaatgaaaagatagcaaagggattggtgagtgaatccagcaatgtccataagattgaaaggcgtggtaggccaaagggttcagccccaaaccccaaggagaatgcttctcgattggatgcagagattgaacgtgagaagaatacacatgtttatggaattttgagtacgactatgccacataaacatatacacgaggaatccattttactgctagaagaccacgtaaataagaaagacgatgcagattttgttcttgagtgctcaaaggagtccggaattgaaaagatagcaaagggattggtgagtgaatctgacaatgtccataagactcatgatgtcgaagtgggggatattttttatgaaaaggaagtgaaagaaactatagaccatcgattggaaccttcagatatgttgggcgactgtgagaccaaaaaggagccaaggaattcaaggtgtcatcaatgctggaagaagagtagaactggtcttgttgtttgttccaagtgcaaaaaaaagaaatattgctacgagtgcgtagcgaaatggtaccaagataaaactagagaggagatagagactgcttgtcccttttgtctggattattgcaattgccgaatgtgcttgaagaaagctatatcttcaatgaatgggaatgatgaagcagatagagatgtcaaattacggaagctgttttacttgcttaaaaaaactttgccattactccaagatatccaacgggagcagcgatatgagttggaagtagaagcaaccatgcacggttcccagttggtggaagaggaggatattaggaaggcagaagttgatgatgatgatcgagtttattgtgacaactgcaatacatccattgtcaatttccacagaagttgttccaatcctaattgtgagtatgatctctgtcttacttgttgcactgaactaagacttggagttcattgtaaagatattcctactagtggtaatgaggaaatggtcgacgcaccacctgaatctattgcttggagagcagagacaaatggtagtattccctgccctccggaagctagaggaggttgtggtactgctatcctctcactgaggcgcctattcgaagctaattggattgacaagttgactagaggtgtggaggaacttactgtcaaatatcagccacctattatggatcttgctcttggatgttcagagtgccgtagttttgaggaagatgtagcacaaaattctgcaaggaaggcagcttcaagagaaaccggttatgacaactttttgtactgtccggatgctgttgaaaccggagaaacaacatttgaacatttccaaagacactggataaggggtgaacctgttatagttaggaatgcctataaaaaggctagtggtcttagctgggacccaatggtgatgtggagagcttttatgggggcaaggaaaatattaaaagaggatgccgttaattttaaagccattgattgcttggattggtgcgaggtagaaattaacgcctttcagttcttcaaaggatacttggaaggtcgtagatacagaaatggatggccagctatgctgaagctaaaggattggcctccatcaaatttttttgaagagtgtttgccaaggcatggtgctgagtttatagcgatgcttccttttagtgattatacacatcccaaatccggtattttaaacctggccactaagctccctgctgcttcgaagcctgatttgggtcctaaaacatacattgcttatggaacttcagatgagttgagtagaggtgattctgtgacaaaattacactgtgacatttcagatgcggtcaatattctgacacacactgccgaggtaaagccaccaccatggcaatccagaatcattagaaagttacaaaagaaatatgaagatgaagatatgcgtgagctctacagtcaagacaaaaaggaagttggtttacctagaaaaagaggcagaaagcgccgcgtaggttttagcgtggatcctaaaacatccgaaaaagaagacactagtggtagagactcaaccttacaaggaagtcaaggaaaagaagagaaacttgatgaccaagaatcctcagaacccaccaaaattgaattcgacttaaatgccagcgagcaggaaatatccgattcaccaaggtttcagcaatttgacctcaatagtcatgactccagtttattagttcctggtaacgattgtgagtcgatgcattatgataatgtgcaggaaaggtgctcatcgcaaggtgatggatcttataaaggaatttcatccgtgatagatgatcaaccttgtagtggaacaaaagaaacaaaaaatgtcaacaaattaaattcttcagacgacaactgttcggatatcgagactaacaatatagattcagtcgaaaaggatattttgagtaatagtttatgtcaaaacgatgttcatttggggactcaaaatgggagtgctgtatgggacatattccggaggcatgatgttcccaagctaacagaatatcttaagaaacaccatagagagtttcgccacatagttaatcttccggtgaattctgtgattcatcccattcatgaccagatcctttatttaaacgagaagcataaaaagcagctaaaaatagaatatggtgttgaaccgtggacgttcgagcaacatctcggggaggctgttttcatacctgcaggatgcccacatcaagtgagaaatagaaagtcttgcataaaagtggctatggacttcgtttcgcctgagaatgttcgagaatgtgttcaattgacagaggaatttcgattacttcccaaaaaccatagatctaaggaagataaattggagataaagaagatggcactttatgctgctgatgttgctgttgctgaagccaataaactcctgggagctaaatga

SEQ ID NO: 268 - protein, 1641 aa, Vicia sativa
MDVGGGDEEFRRCNRNGSGRRCKDGALPGNLQCEKHQLCAVERKKNRKETSSGRKRKAEESLLDEDDGGNGLFAGGAGGAGGAGGGVFVEGGVNVGIGSESFNLWQEGEGQQVEVFGEGSGNLGKFLGDGVEFLGGFVEDRNVVGLGQPWSSVGVFGNAGGVAGVGKEDHGSRVDGVCGNDSLAFHSQGIEGLIGEEEGGFGNLYDRSFQALLCQGKVCDEDVNLIGGATGFQGLVGESAFNFSGQDGEGVGNLSQHDGKFDGEKNVGNILEAPSSSNKMKAIGVEEGVELLPSAGVSANEEARGEVLKPLTSRGGRPKGSKNKKKKGVSLVLDGEAVCGSDNAGTIGMGTVEVLENEKSVFCGKSDGEGVDTGEIARTRECSPPENQKSTTEIFLAHGYEVAGVGEISRPLNKEKNVEEVSSEVAVEISRSKKRGRPKGSTKKKVTCSASRKGAGDIATQGSEEKMLIVPYQKDADEFASLTSKLGPALSTRNKLRSTEFEGCKHPGMSSNVRLEENDGTASGLEITTLAPLREAEKGMPFESAKHIENLTTPPIVKRGRPKGSKNKKKTLADQEHIGHGGDIIKLIGMESSEAAVSVGDQELVVQPLVKVRFRMLNPKMGRPKGSKNKKKNVDGEAENGLHKEGKKRGRPKGSVNNPKETGNEKIAKGLVSESSNVHKIERRGRPKGSAPNPKENASRLDAEIEREKNTHVYGILSTTMPHKHIHEESILLLEDHVNKKDDADFVLECSKESGIEKIAKGLVSESDNVHKTHDVEVGDIFYEKEVKETIDHRLEPSDMLGDCETKKEPRNSRCHQCWKKSRTGLVVCSKCKKKKYCYECVAKWYQDKTREEIETACPFCLDYCNCRMCLKKAISSMNGNDEADRDVKLRKLFYLLKKTLPLLQDIQREQRYELEVEATMHGSQLVEEEDIRKAEVDDDDRVYCDNCNTSIVNFHRSCSNPNCEYDLCLTCCTELRLGVHCKDIPTSGNEEMVDAPPESIAWRAETNGSIPCPPEARGGCGTAILSLRRLFEANWIDKLTRGVEELTVKYQPPIMDLALGCSECRSFEEDVAQNSARKAASRETGYDNFLYCPDAVETGETTFEHFQRHWIRGEPVIVRNAYKKASGLSWDPMVMWRAFMGARKILKEDAVNFKAIDCLDWCEVEINAFQFFKGYLEGRRYRNGWPAMLKLKDWPPSNFFEECLPRHGAEFIAMLPFSDYTHPKSGILNLATKLPAASKPDLGPKTYIAYGTSDELSRGDSVTKLHCDISDAVNILTHTAEVKPPPWQSRIIRKLQKKYEDEDMRELYSQDKKEVGLPRKRGRKRRVGFSVDPKTSEKEDTSGRDSTLQGSQGKEEKLDDQESSEPTKIEFDLNASEQEISDSPRFQQFDLNSHDSSLLVPGNDCESMHYDNVQERCSSQGDGSYKGISSVIDDQPCSGTKETKNVNKLNSSDDNCSDIETNNIDSVEKDILSNSLCQNDVHLGTQNGSAVWDIFRRHDVPKLTEYLKKHHREFRHIVNLPVNSVIHPIHDQILYLNEKHKKQLKIEYGVEPWTFEQHLGEAVFIPAGCPHQVRNRKSCIKVAMDFVSPENVRECVQLTEEFRLLPKNHRSKEDKLEIKKMALYAADVAVAEANKLLGAK

SEQ ID NO: 269 - DNA, 3012 bp, Oryza sativa
  CDS (1)..(3012)
atgggattaagcgattatgatctaatgggggtggcggtaccagggacgggtgttggtggaccccatcctgaagcccttaaagaaaggcaattcggtcattggcttcagttaaccgagaaaaccgatttgtggctcaataggcctaggaggcccaataagcctagtgaaacacaaaaccctagagggcagcaccagcagggagtaagtcagccactcccactcagcctcaccagcgctgcctccaatccatctctaccctatccgtcgagcgccatcgcgcggtcacgcctccgcctccgcctccatcgaccatcccgccacctccgcccttcacctccatcgcgccgcgggcatccatcgcgccgcctcctcgtctccactccactccactctcaagctaccccgcctccagctcggtgcctccatcctgccggccgcatccgtctgcatcggggaggcagcaagccaacggctgtgaatccgttacgatggctacatctgttgattcttgcgatgatgctttgtaacctctgggaggtgtatactttagctcagagaaatcgaaaatttaatgaacttctgaatgatgaagcgataatgatgaagccttcaaaagaatcgaagaaaagaggtgcaggaaagaaacaagaggaagaagagaataataccatatccattgaggatgaaatgtgtgatgcgaacaataagaaggggaagaagatgctcactggggaaaatgctttgatgtgccaccagtgtcaaagaaatgacaaagggagggtgatttggtgtaaatcatgcaacaataagcgcttctgtgagccatgcatgaaacgatggtacccaggtttgtcagaagttgattttgctgcaaaatgcccatattgtagaaagaactgtaattgcaaggcatgcctaagaatgataggagttgaaaagccccctgaaaagaagatttctgaggaaaatcaacgacgttatgcttttcgtattgtagacttgttgcttccttggttgaaagaacttcaacaggagcagatgaaggagaaggaattagagggtagattacaaggtgtttctatggatgaagtaaagttggaacaagctgattgtgatatggatgagcgtgtttattgtgataggtgcaaaacttcgatagttgattttcatagaagctgcaaggcttgttcgtatgacttgtgccttgcatgctgctgggagcttcgcaaaggtgagattccaggaggagaagaggcaaagagtgtgcagtgggaagagagaggtcagaagtatgtttttggtaatatttccaaggatgagaagaaaagggtatcttcgaagaggcacatggagacccccagtactgaaacttgcaatgacatggctgttgctggggacccaaataaccctttgttactgtggaaagctaatagtgatggcagtataccttgtccaccaaaggaaatagggggctgcggtgcttcatctttggtactcagatgcttattaccagaaattatgctttctgagttagaacacagggctaacaaagttattaagagagaagcatttgataaagcaataaacgaaacaagtgatcagtgcccttgcttttatcacacaagcaagataagaacaaatgctactcgagaggcagcaaacagaaagggctcaagtgataactacttgtactgtccagatgccaataatatccaggaggatgacctgtcgcactttcagatgcattggtcaaaaggtgaaccggttattgtttctgatgctcttcggttaacatctggtctgagctgggagccattggttatgtggcgggcattgcgagagaagaaaaccaatggtgatgttgaagatgagcactttgctgttaaggcagtggattgccttgattggaatgaggtggaaattaacatacacatgttctttatggggtatatgagaggtagaagacatccgatgaccttttggcctgagatgcttaagctaaaagattggccaccatctagtatgtttgaccagaggttacctcgccatggtgctgagtttataactgcattgccatttcccgagtatactgatccacgatatggcccgctaaatcttgctgtcaggcttcctgctggtgtactgaagcctgatcttgggccaaaaacttatattgcttatggatgttatgaagagttaggcaggggtgactctgtgaccaagcttcattgcgacatgtctgatgcggtaaatatcttgatgcacacagctgaagtgtcctatgacactgaacagcttgacaagatagcaaaaattaaaatgaaaatgagagaacaagatcttcatgaactgtttggggtttcagaatcaggcgccaagggtaaagctgatgatgaagcatcgaaaatctcatgtaacatggaaaacaaacacacctctaaccaaagtactaagggtttggacattaatgctttaccacctgatgattctggaagtgatattggggataaaccatcattttgtcaatctgaggtttctcacccaattcatgaccagactttctatttaactgtggagcataagagaaagctcaaggaagaacacggtgttgaaccatggacattcgagcagaagctaggcgatgcagttttcattcctgctggatgtccacaccaatcttgcatcaaggttgctctagactttgtttcccctgaaaatgttggtgagtgtgttaagctgaccggagagtttagacgtcttccatctgatcacagggctaaagaagataaactagagattaagaagattgctctcaatgctcttaaagaagtcgtaaatttcttagatcctttaccaaaagggtcaaagaacagggatgaagtggtagaagtgaccaaaccaaaaaggaaatacggtaaccgaagaggtgacctgaagagtggggaagaccaacccattgatgaatccatagaagaaaggaagcctaaaaagcgagggagatctaaacggtga

SEQ ID NO: 270 - protein, 1003 aa, Oryza sativa
MGLSDYDLMGVAVPGTGVGGPHPEALKERQFGHWLQLTEKTDLWLNRPRRPNKPSETQNPRGQHQQGVSQPLPLSLTSAASNPSLPYPSSAIARSRLRLRLHRPSRHLRPSPPSRRGHPSRRLLVSTPLHSQATPPPARCLHPAGRIRLHRGGSKPTAVNPLRWLHLLILAMMLCNLWEVYTLAQRNRKFNELLNDEAIMMKPSKESKKRGAGKKQEEEENNTISIEDEMCDANNKKGKKMLTGENALMCHQCQRNDKGRVIWCKSCNNKRFCEPCMKRWYPGLSEVDFAAKCPYCRKNCNCKACLRMIGVEKPPEKKISEENQRRYAFRIVDLLLPWLKELQQEQMKEKELEGRLQGVSMDEVKLEQADCDMDERVYCDRCKTSIVDFHRSCKACSYDLCLACCWELRKGEIPGGEEAKSVQWEERGQKYVFGNISKDEKKRVSSKRHMETPSTETCNDMAVAGDPNNPLLLWKANSDGSIPCPPKEIGGCGASSLVLRCLLPEIMLSELEHRANKVIKREAFDKAINETSDQCPCFYHTSKIRTNATREAANRKGSSDNYLYCPDANNIQEDDLSHFQMHWSKGEPVIVSDALRLTSGLSWEPLVMWRALREKKTNGDVEDEHFAVKAVDCLDWNEVEINIHMFFMGYMRGRRHPMTFWPEMLKLKDWPPSSMFDQRLPRHGAEFITALPFPEYTDPRYGPLNLAVRLPAGVLKPDLGPKTYIAYGCYEELGRGDSVTKLHCDMSDAVNILMHTAEVSYDTEQLDKIAKIKMKMREQDLHELFGVSESGAKGKADDEASKISCNMENKHTSNQSTKGLDINALPPDDSGSDIGDKPSFCQSEVSHPIHDQTFYLTVEHKRKLKEEHGVEPWTFEQKLGDAVFIPAGCPHQSCIKVALDFVSPENVGECVKLTGEFRRLPSDHRAKEDKLEIKKIALNALKEVVNFLDPLPKGSKNRDEVVEVTKPKRKYGNRRGDLKSGEDQPIDESIEERKPKKRGRSKR

SEQ ID NO: 271 - DNA, 2784 bp, Arabidopsis thaliana
  CDS (1)..(2784)
atgtcggagaacgaaatcgtccctgacgagtttcgttgcaaccgctctgatggtaagcaatggcggtgcaagagacgagctttagaggggaaaaagatgtgtgagagtcatcactcgcagcaaagcctaaagcgaagtaagcagaaagttgcagagtcttctaagcttgtcagatcaagaagaggaggaggagatgaagtggcgtcttcagagatcgagccaaacgaaagcagaattaggtctaagagattggggaaatcgaagaggaagagagtgatgggtgaagcagaggctatggatgaagcagtgaagaagatgaagttgaagagaggagatttgcagttggatttgataaggatggtgttgaagagagaagttgagaagaggaagagattaccaaatagtaataataagaagaagagtaatggagggtttagtgaatttgttggagaagagttaacgagggttcttcctaatggtattatggcaatttctccaccttctcctactactagtaatgtgtcttctccttgtgatgttaaagttggggaagagccaatttcgatgattaaaaggaggtttaggtctaagaacattgaacctttgccaattgggaaaatgcaggtggttcctttcaagggtgatttggttaatggaaggaaggaaaagaagatgaggtgtcattggtgtggaaccagaggatttggggatttgattagttgtttgagttgtgaaagagagttcttttgcatagattgtatcgagaaaaggaacaagggatcgaaagaagaagttgagaaaaaatgtcctgtatgccgtgggtcatgtaggtgcaaagtttgctcagtcactaattctggagtcactgaatgtaaggattctcagagtgtcaggagtgatattgacagggttttgcatctacattatgcggtgtgcatgctacttccagtactaaaagaaatcaatgcggaacacaaagtggaggtggaaaatgacgcagaaaagaaagagggaaatccagctgaaccacaaatccatagctctgaattaacctctgacgatcgacagccctgtagcaatggtcgtgactttgccgtagtggatttgcaaagaatgtgcacacgcagttcctctgttctcaggctaaattctgaccaagatcagagtcaagagagcttatctagaaaggttggatcggttaaatgctcgaatggtataaaatctccaaaagtgtgtaagcggaaagaagtcaaagggtgcagcaataacctttttttgagtctattccctctggagttgacaagcaagttagagatcagtgcagaggaagtagtcagttgctatgagttgcctgaaattttagataaatattcgggatgtccattttgtattggaatggaaacgcaatctagtagtagcgacagccatttgaaagaagcatccaagacaagagaagacggaactggtaacttcttatactaccccacagtgctggattttcatcaaaacaatctggaacattttcagacacactggagtaaaggccatcctgtaatagttcgtagtgtgataaagagtggttcaagcctgaattgggatccagtagccttgttctgtcactatcttatgaacagaaacaacaaaaccggtaatactactgattgtatggattggtttgaggtagaaattggtgtcaagcaattttttttggggtctttgagaggaaaggctgagactaatacttgtcaagaaaggctgaagctggagggatggctttcatcttcattgtttaaagaacagttcccaaatcattacgctgaaatactgaatattttaccaatctcccattacatggatccaaagcgcggtctactaaatattgcagccaacctacctgacactgtacaaccacccgattttggcccatgcctcaatatttcatacaggagtggtgaagaatatgcacagcctgattctgtgaagaagttaggttttgaaacttgtgacatggttgatatcttgttatatgtcacagaaacacctgtatccacaaaccagatttgtaggataagaaagctaatgaaaaacatcggaagagtaagatctaaaaatccggcaaaggggagggaaagcagatttgataagggaaagaaacgagataggttggatgactattccagttctgattcagaatcttcacaacactgtttaggcgctaaatgcagaggcagtgagtttgagggagaggaaagagaaagttgcaactactcttgtgaagaagagagcctaagcaacacttatggtgcccagtgggatgtattccaaaaacaagatgtttctaaacttcttgagtatattaagaaccactctctggagctagaatccatggattccagcaaaaaaaaggtgagtcatccattacttgagcagagttactatcttgatgagtatcacaaagcaaggcttaaggaagaatttgacgttgaaccatggagttttgatcaatgtgttggggaagcagtcatcctccctgctggatgtccataccaaattagaaagaataagtcttgtgtaaatgcggttctgaagtttctgtcacctgagcacgttagcgaatctattaaacgagtgaaggagctcaatcaacttcctcagagcgtcaaatcgaaagcaaataagattgaggtgaagaaaatggcgattcataaaatcagcgaagctgtaaaggaaattcgggaactcacatcttcggattcaactggtgcattgagattatataactag

SEQ ID NO: 272 - protein, 927 aa, Arabidopsis thaliana
MSENEIVPDEFRCNRSDGKQWRCKRRALEGKKMCESHHSQQSLKRSKQKVAESSKLVRSRRGGGDEVASSEIEPNESRIRSKRLGKSKRKRVMGEAEAMDEAVKKMKLKRGDLQLDLIRMVLKREVEKRKRLPNSNNKKKSNGGFSEFVGEELTRVLPNGIMAISPPSPTTSNVSSPCDVKVGEEPISMIKRRFRSKNIEPLPIGKMQVVPFKGDLVNGRKEKKMRCHWCGTRGFGDLISCLSCEREFFCIDCIEKRNKGSKEEVEKKCPVCRGSCRCKVCSVTNSGVTECKDSQSVRSDIDRVLHLHYAVCMLLPVLKEINAEHKVEVENDAEKKEGNPAEPQIHSSELTSDDRQPCSNGRDFAVVDLQRMCTRSSSVLRLNSDQDQSQESLSRKVGSVKCSNGIKSPKVCKRKEVKGCSNNLFLSLFPLELTSKLEISAEEVVSCYELPEILDKYSGCPFCIGMETQSSSSDSHLKEASKTREDGTGNFLYYPTVLDFHQNNLEHFQTHWSKGHPVIVRSVIKSGSSLNWDPVALFCHYLMNRNNKTGNTTDCMDWFEVEIGVKQFFLGSLRGKAETNTCQERLKLEGWLSSSLFKEQFPNHYAEILNILPISHYMDPKRGLLNIAANLPDTVQPPDFGPCLNISYRSGEEYAQPDSVKKLGFETCDMVDILLYVTETPVSTNQICRIRKLMKNIGRVRSKNPAKGRESRFDKGKKRDRLDDYSSSDSESSQHCLGAKCRGSEFEGEERESCNYSCEEESLSNTYGAQWDVFQKQDVSKLLEYIKNHSLELESMDSSKKKVSHPLLEQSYYLDEYHKARLKEEFDVEPWSFDQCVGEAVILPAGCPYQIRKNKSCVNAVLKFLSPEHVSESIKRVKELNQLPQSVKSKANKIEVKKMAIHKISEAVKEIRELTSSDSTGALRLYN

SEQ ID NO: 273 - protein, 878 aa, Unknown
  Consensus sequence
  MISC_FEATURE (2)..(877): xaa located in positions 2-55, 58, 60-70, 72-73, 75-79,; 81-82, 84-87, 89-95, 97-99, 101-102, 104-106, 108, 110-111,; 114-136, 138-144, 147, 150-154, 156-157, 159, 161, 163-183,
  185-187, 189-190, 192-196, 198-199, 201, 203-206, 209-211,; 214, 217-323, 325-329, 333, 335-341, 344-346, 348, 350,; 352-356, 358-360, 362-365, 367-406, 408-411, 414-416, 419-430,; 434, 437, 440, 446-447, 449-453, 455, 457, 459-462, 464-483,
  485, 489-491, 494-499, 502, 505-506, 508-514, 516-517, 525-528,; 530-533, 535, 537-538, 541-543, 546-548, 550-551,; 553-554, 556, 559, 561-562, 565-569, 572, 576, 578-580,; 582-584, 586-588, 597-600, 602, 604-605, 607, 609-610,; 612-733, 736, 739, 741, 743, 749-750, 752-754, 756-757,; 759-769, 771, 774-776, 778-780, 782-784, 787-788, 791,; 793-799, 805, 807-808, 813, 820, 822, 825-826, 829-830,; 833, 836-837, 840-842, 844-845, 848-849, 851, 853,
  29098:<223. 856-857, 859-863, 867-868 and 870-877; each xaa is any amino acid
RXXXXXXXXXXXXXXXXXXXXXXXXXXXXXXXXXXXXXXXXXXXXXXXXXXXXXXCHXCXXXXXXXXXXXCXXCXXXXXCXXCXXXXYXXXXXXXVXXXCXXCXXXCXCXXCLXXXXXXXXXXXXXXXXXXXXXXXLXXXXXXXLPXLKXXXXXQXXEXEXEXXXXXXXXXXXXXXXXXXXXXEXXXCXXCXXXXXDXXRXCXXXXCSXXXCLXCCXXXXXXXXXXXXXXXXXXXXXXXXXXXXXXXXXXXXXXXXXXXXXXXXXXXXXXXXXXXXXXXXXXXXXXXXXXXXXXXXXXXXXXXXXXXXXXXXXXXXXXXXXXXWXXXXXGSIXCXXXXXXXCGXXXLXLXRXXXXXWXXXLXXXXEXXXXXXXXXXXXXXXXXXXXXXXXXXXXXXXXXXXXXXXXRXXXXDNXXXSPXXXXXXXXXXXXHFQXHWXKGXPVIVRXXLXXXXXLXWXPXXXXRXXXXXXXXXXXXXXXXXXXXAXDCLXXXEVXXXXXXFFXGYXXGXXXXXXXPXXLKLKDWPXXXXFXXXXPXHXXEFXXXLPXXXYXXPXXGXLNXAXXLPXXXXXPDXGPKXYXXXGXXXEXXXGDSVTKLHXXXXDXVXXLXHXXEXXXXXXXXXXXXXXXXXXXXXXXXXXXXXXXXXXXXXXXXXXXXXXXXXXXXXXXXXXXXXXXXXXXXXXXXXXXXXXXXXXXXXXXXXXXXXXXXXXXXXXXXXXXXXXXXXXXXXXXXXXGAXWDXFXRXDVPKLXXYXXXHXXEXXXXXXXXXXXVXHPXXXQXXXLXXXHKXXLKXEXXXXXXXEPWTFXQXXGEAVXIPAGCPXQXRNXXSCXXVAXDFXXPEXXXEXXRLXXEXRXLPXXHXXXXXKLEXXKXXXXXXXXA

SEQ ID NO: 274 - protein, 964 aa, Unknown
  Consensus sequence
  MISC_FEATURE (5)..(963): xaa located in positions 5 to 13, 17 to 18, 20 to 24,; 26 to 27, 29 to 32, 34 to 44, 47, 49 to 51, 53, 55 to 56,; 59 to 86, 107 to 114, 116 to 117, 119, 121, 123 to 144, 158
  to 159, 163 to 170, 172, 174 to 175, 179 to 182, 185, 188 to; 190, 192 to 199, 294 to 298, 302, 304, 313 to 315, 317,; 319 to 329, 331 to 334, 336 to 351, 357 to 370, 384 to 385, 387,; 389 to 400, 403 to 404, 407 to 408, 410, 413, 415 to 425, 427,
  429 to 432, 434 to 445, 455, 459 to 461, 464 to 467, 471 to 472,; 475 to 476, 478 to 484, 487 to 488, 496 to 509, 512 to 514,; 517 to 518, 521 to 522, 524 to 525, 527, 530, 532 to 533, 536 to 541,; 543, 547, 549 to 551, 553 to 555, 557 to 559, 565, 568 to 571, 573,
  575 to 576, 590, 592 to 593, 595 to 644, 808, 811, 813 to 815, 817; to 818, 821 to 848, 877 to 879, 882 to 883, 885 to 886, 888 to 890,; 898, 900, 902 to 903, 907 to 909, 915, 917 to 925, 931 to 932, 935; to 937, 939 to 941, 943 to 944, 946, 948, 951 to 952, 954 to 959
  and 962 to 963, each xaa is any amino acid
  MISC_FEATURE (14)..(928): xaa located in positions 14 to 15, 87 to 104, 45 to 156,; 160 to 161, 176 to 177, 200 to 292, 305 to 310, 352 to 355,; 371 to 381, 401, 446 to 453, 468 to 469, 485, 519, 577 to 588,
  645 to 806, 849 to 875, 891 to 894 and 926 to 928, each xaa
  is any or no amino acid
CHQCXXXXXXXXXXXCXXCXXXXXCXXCXXXXYXXXXXXXXXXXCPXCXXXCXCXXCLXXXXXXXXXXXXXXXXXXXXXXXXXXXXXXXXXXXXXXXXXXXXXXLPXXXXXXXXQXXEXEXEXXXXXXXXXXXXXXXXXXXXXXXXXXXXXXXXXXCXXXXCXXXXXXXXRXCXXXXCXXXXCLXCCXXXRXXXXXXXXXXXXXXXXXXXXXXXXXXXXXXXXXXXXXXXXXXXXXXXXXXXXXXXXXXXXXXXXXXXXXXXXXXXXXXXXXXXXXXXXXXXXXXXXXXXXXWXXXXXGSIXCXXXXXXXCGXXXLXLXXXXXXXXXXXLXXXXEXXXXXXXXXXXXXXXXXXXXCXXXXXXXXXXXXXXXXXXXXXXXXXDNXXYXPXXXXXXXXXXXXXFXXHWXXGXPVXVXXXXXXXXXXXWXPXXXXRXXXXXXXXXXXXXXXXXXXXAXDCLXXXEVXXXXXXFXXGYXXGXXXXXXXXPXXLKLKDWPXXXXXXXXXXXXXXEFXXXLPXXXYXXPXXGXLNXAXXLPXXXXXXDXGPKXYXXXGXXXEXXXGDSVTXLHXXXXDXVXXXXXXXXXXXXXXLXHXXEXXXXXXXXXXXXXXXXXXXXXXXXXXXXXXXXXXXXXXXXXXXXXXXXXXXXXXXXXXXXXXXXXXXXXXXXXXXXXXXXXXXXXXXXXXXXXXXXXXXXXXXXXXXXXXXXXXXXXXXXXXXXXXXXXXXXXXXXXXXXXXXXXXXXXXXXXXXXXXXXXXXXXXXXXXXXXXXXXXXXXXXXXXXXXXXXXXXXXXXXXXXXXXXXXXXXAXWDXFXXXDXXKLXXXXXXXXXXXXXXXXXXXXXXXXXXXXXXXXXXXXXXXXXXXXXXXXXXXXXXXLXXXHKXXLXXEXXXXXXXEPWXFXQXXGEAXXXPAGCPXQXXXXXXXXXXXXDFXXPEXXXEXXXLXXEXRXLPXXHXXXXXXLEXXK

SEQ ID NO: 275 - protein, 120 aa, Unknown
  Consensus sequence
  MISC_FEATURE (2)..(119): xaa located in positions 2 to 5, 8 to 13, 15 to 20, 22; to 32, 35 to 36, 38 to 52, 54 to 58, 60 to 62, 64 to 65, 67; to 68, 70, 73, 75 to 77, 79 to 84, 86, 89 to 98, 100 to 103,
  106 to 114, 116 and 118 to 119; each xaa is any amino acid
CXXXXEVXXXXXXFXXXXXXGXXXXXXXXXXXKLXXWXXXXXXXXXXXXXXXEXXXXXPXXXYXXPXXGXLNXAXXXPXXXXXXDXGPXXXXXXXXXXEXXXXDSXXXXXXXXXDXVXXL

SEQ ID NO: 276 - protein, 14 aa, Unknown
  Consensus sequence
  MISC_FEATURE (2)..(12): xaa located in positions 2, 5, 7 to 9 and 12; each xaa is any amino acid
AXWDXFXXXDVXKL

SEQ ID NO: 277 - protein, 58 aa, Unknown
  Consensus sequence
  MISC_FEATURE (3)..(3): xaa in position 3 is Gln, His or Trp
  MISC_FEATURE (5)..(5): xaa in position 5 is any amino acid
  MISC_FEATURE (6)..(6): xaa in position 6 is Lys, Arg, Thr or Ile
  MISC_FEATURE (7)..(10): xaa in position 7 to 10 is any amino acid
  MISC_FEATURE (11)..(12): xaa in position 11 to 12 is any or no amino acid
  MISC_FEATURE (13)..(13): xaa in position 13 is Leu, Val or Ile
  MISC_FEATURE (14)..(15): xaa in position 14 to 15 is any amino acid
  MISC_FEATURE (16)..(16): xaa in position 16 is Cys or Gln
  MISC_FEATURE (17)..(18): xaa in position 17 to 18 is any amino acid
  MISC_FEATURE (20)..(20): xaa in position 20 is Asn, Glu, Lys or Asp
  MISC_FEATURE (21)..(21): xaa in position 21 is any amino acid
  MISC_FEATURE (22)..(22): xaa in position 22 is Lys, Arg, Thr or Glu
  MISC_FEATURE (23)..(23): xaa in position 23 is any amino acid
  MISC_FEATURE (24)..(24): xaa in position 24 is Tyr or Phe
  MISC_FEATURE (26)..(27): xaa in position 26 to 27 is any amino acid
  MISC_FEATURE (29)..(29): xaa in position 29 is Ile, Leu, Met or Val
  MISC_FEATURE (30)..(31): xaa in position 30 to 31 is any amino acid
  MISC_FEATURE (32)..(32): xaa in position 32 is Trp, Arg or Ser
  MISC_FEATURE (33)..(33): xaa in position 33 is Tyr or Asn
  MISC_FEATURE (34)..(34): xaa in position 34 is Pro, Ser, Gln or Lys
  MISC_FEATURE (35)..(35): xaa in position 35 is any amino acid
  MISC_FEATURE (36)..(36): xaa in position 36 is any or no amino acid
  MISC_FEATURE (37)..(37): xaa in position 37 is Ser, Thr, Pro or Ala
  MISC_FEATURE (38)..(38): xaa in position 38 is any amino acid
  MISC_FEATURE (39)..(39): xaa in position 39 is Glu, Asp, Asn or Val
  MISC_FEATURE (40)..(40): xaa in position 40 is Glu or Asp
  MISC_FEATURE (41)..(41): xaa in position 41 is Val, Ile or Phe
  MISC_FEATURE (42)..(43): xaa in position 42 to 43 is any amino acid
  MISC_FEATURE (44)..(44): xaa in position 44 is Lys, Ala, Val or Ile
  MISC_FEATURE (46)..(46): xaa in position 46 is Pro or Met
  MISC_FEATURE (47)..(47): xaa in position 47 is any amino acid
  MISC_FEATURE (49)..(51): xaa in position 49 to 51 is any amino acid
  MISC_FEATURE (53)..(53): xaa in position 53 is Asn, Asp, Ile or Arg
  MISC_FEATURE (55)..(55): xaa in position 55 is Lys, Arg, Ser or Cys
  MISC_FEATURE (56)..(56): xaa in position 56 is any amino acid
  MISC_FEATURE (58)..(58): xaa in position 58 is Leu or Ser.
CHXCXXXXXXXXXXXXXXCXXXXXCXXCXXXXXXXXXXXXXXXXCXXCXXXCXCXXCX

SEQ ID NO: 278 - protein, 92 aa, Unknown
  Consensus sequence
  MISC_FEATURE (1)..(2): xaa in position 1 to 2 is Leu, Ile or Val
  MISC_FEATURE (3)..(4): xaa in position 3 to 4 is any amino acid
  MISC_FEATURE (5)..(5): xaa in position 5 is Val, Met, Leu or Thr
  MISC_FEATURE (6)..(6): xaa in position 6 is Leu or Arg
  MISC_FEATURE (8)..(8): xaa in position 8 is any amino acid
  MISC_FEATURE (9)..(9): xaa in position 9 is Leu, Ile or Val
  MISC_FEATURE (10)..(10): xaa in position 10 is Lys, Gln or Asn
  MISC_FEATURE (11)..(11): xaa in position 11 is any amino acid
  MISC_FEATURE (12)..(12): xaa in position 12 is Ile or Leu
  MISC_FEATURE (13)..(14): xaa in position 13 to 14 is any amino acid
  MISC_FEATURE (15)..(15): xaa in position 15 is Glu, Phe or Ala
  MISC_FEATURE (17)..(18): xaa in position 17 to 18 is any amino acid
  MISC_FEATURE (19)..(19): xaa in position 19 is Glu or Ile
  MISC_FEATURE (20)..(20): xaa in position 20 is any amino acid
  MISC_FEATURE (22)..(22): xaa in position 22 is any amino acid
  MISC_FEATURE (23)..(23): xaa in position 23 is Glu or Tyr
  MISC_FEATURE (24)..(25): xaa in position 24 to 25 is any amino acid
  MISC_FEATURE (26)..(26): xaa in position 26 is Ile, Val, Leu or Met
  MISC_FEATURE (27)..(27): xaa in position 27 is any amino acid
  MISC_FEATURE (28)..(28): xaa in position 28 is Gly, Asp, Glu or Phe
  MISC_FEATURE (29)..(29): xaa in position 29 is any amino acid
  MISC_FEATURE (30)..(41): xaa in position 30 to 41 is any or no amino acid
  MISC_FEATURE (42)..(42): xaa in position 42 is Glu or Gln
  MISC_FEATURE (43)..(44): xaa in position 43 to 44 is any amino acid
  MISC_FEATURE (45)..(45): xaa in position 45 is Ile, Leu, Val or Pro
  MISC_FEATURE (46)..(52): xaa in position 46 to 52 is any amino acid
  MISC_FEATURE (53)..(53): xaa in position 53 is Asp, Glu, Ser or Gly
  MISC_FEATURE (54)..(54): xaa in position 54 is Glu or Asp
  MISC_FEATURE (55)..(55): xaa in position 55 is Arg or Gln
  MISC_FEATURE (56)..(56): xaa in position 56 is Val, Met, Leu or Ile
  MISC_FEATURE (57)..(57): xaa in position 57 is Tyr, Cys or Phe
  MISC_FEATURE (58)..(58): xaa in position 58 is Cys or Trp
  MISC_FEATURE (59)..(60): xaa in position 59 to 60 is any or no amino acid
  MISC_FEATURE (61)..(61): xaa in position 61 is Asp or Asn
  MISC_FEATURE (62)..(62): xaa in position 62 is any amino acid
  MISC_FEATURE (64)..(64): xaa in position 64 is any amino acid
  MISC_FEATURE (65)..(65): xaa in position 65 is Thr or Ile
  MISC_FEATURE (66)..(66): xaa in position 66 is Ser, Pro or Ala
  MISC_FEATURE (67)..(67): xaa in position 67 is Ile or Val
  MISC_FEATURE (68)..(68): xaa in position 68 is any amino acid
  MISC_FEATURE (69)..(69): xaa in position 69 is Asp or Asn
  MISC_FEATURE (70)..(70): xaa in position 70 is Phe, Leu or Tyr
  MISC_FEATURE (71)..(71): xaa in position 71 is His or Tyr
  MISC_FEATURE (73)..(73): xaa in position 73 is Ser, His, Asn or Arg
  MISC_FEATURE (75)..(76): xaa in position 75 to 76 is any or no amino acid
  MISC_FEATURE (77)..(77): xaa in position 77 is Pro, Lys or Ser
  MISC_FEATURE (78)..(78): xaa in position 78 is any amino acid
  MISC_FEATURE (80)..(80): xaa in position 80 is any amino acid
  MISC_FEATURE (81)..(81): xaa in position 81 is Tyr, Ser, Phe or Val
  MISC_FEATURE (82)..(82): xaa in position 82 is Asp or Glu
  MISC_FEATURE (83)..(38): xaa in position 83 is Leu or Ile
  MISC_FEATURE (85)..(85): xaa in position 85 is Leu or Ile
  MISC_FEATURE (86)..(86): xaa in position 86 is any amino acid
  MISC_FEATURE (88)..(88): xaa in position 88 is Cys or Ser
  MISC_FEATURE (89)..(89): xaa in position 89 is any amino acid
  MISC_FEATURE (90)..(90): xaa in position 90 is Glu or Asp
  MISC_FEATURE (91)..(91): xaa in position 91 is Leu or Ile
  MISC_FEATURE (92)..(92): xaa in position 92 is Arg or Ser
XXXXXXPXXXXXXXXQXXXXEXXXXXXXXXXXXXXXXXXXXXXXXXXXXXXXXXXXXXXXXXCXXXXXXXXRXCXXXXCXXXXCXXCXXXXX

SEQ ID NO: 279 - protein, 52 aa, Unknown
  Consensus sequence
  MISC_FEATURE (1)..(1): xaa in position 1 is Asp, Ser or Gly
  MISC_FEATURE (3)..(3): xaa in position 3 is Tyr, Phe, Leu or Gly
  MISC_FEATURE (4)..(4): xaa in position 4 is Leu, Val or Ile
  MISC_FEATURE (5)..(5): xaa in position 5 is Tyr, Phe or Lys
  MISC_FEATURE (6)..(6): xaa in position 6 is Ser, Cys, Phe or Tyr
  MISC_FEATURE (8)..(8): xaa in position 8 is any amino acid
  MISC_FEATURE (9)..(9): xaa in position 9 is Ala, Ser, Leu or Val
  MISC_FEATURE (10)..(16): xaa in position 10 to 16 is any amino acid
  MISC_FEATURE (17)..(17): xaa in position 17 is any or no amino acid
  MISC_FEATURE (18)..(18): xaa in position 18 is Leu, Phe, Val or Ile
  MISC_FEATURE (19)..(19): xaa in position 19 is any amino acid
  MISC_FEATURE (20)..(20): xaa in position 20 is His, Lys or Asn
  MISC_FEATURE (22)..(22): xaa in position 22 is Gln, Glu or Arg
  MISC_FEATURE (23)..(23): xaa in position 23 is any amino acid
  MISC_FEATURE (24)..(24): xaa in position 24 is His or Gln
  MISC_FEATURE (26)..(26): xaa in position 26 is any amino acid
  MISC_FEATURE (27)..(27): xaa in position 27 is Lys, Arg, Glu or Thr
  MISC_FEATURE (28)..(28): xaa in position 28 is Gly or Ala
  MISC_FEATURE (29)..(29): xaa in position 29 is Glu, Arg or His
  MISC_FEATURE (30)..(30): xaa in position 30 is Pro or Leu
  MISC_FEATURE (31)..(31): xaa in position 31 is Val or Ile
  MISC_FEATURE (32)..(32): xaa in position 32 is Ile, Thr or Val
  MISC_FEATURE (34)..(34): xaa in position 34 is Arg, Lys or Ser
  MISC_FEATURE (35)..(35): xaa in position 35 is any amino acid
  MISC_FEATURE (36)..(36): xaa in position 36 is Val, Ala or Thr
  MISC_FEATURE (37)..(37): xaa in position 37 is Leu, Tyr, Ile or Phe
  MISC_FEATURE (38)..(39): xaa in position 38 to 39 is any amino acid
  MISC_FEATURE (40)..(40): xaa in position 40 is Thr, Ser, Gly or Ala
  MISC_FEATURE (41)..(41): xaa in position 41 is Ser, Ala or Pro
  MISC_FEATURE (42)..(42): xaa in position 42 is Gly, Cys, Ser or Ile
  MISC_FEATURE (43)..(43): xaa in position 43 is Leu or Ser
  MISC_FEATURE (44)..(44): xaa in position 44 is Ser, Arg or Asn
  MISC_FEATURE (45)..(45): xaa in position 45 is Trp or Arg
  MISC_FEATURE (46)..(46): xaa in position 46 is Asp or Glu
  MISC_FEATURE (48)..(48): xaa in position 48 is any amino acid
  MISC_FEATURE (49)..(49): xaa in position 49 is Val, Thr or Ala
  MISC_FEATURE (50)..(50): xaa in position 50 is Met, Ile or Leu
  MISC_FEATURE (51)..(51): xaa in position 51 is Trp, Phe or His
  MISC_FEATURE (52)..(52): xaa in position 52 is Arg or Cys
XNXXXXPXXXXXXXXXXXXXFXXXWXXXXXXXVXXXXXXXXXXXXXPXXXXX

SEQ ID NO: 280 - protein, 121 aa, Unknown
  Consensus sequence
  MISC_FEATURE (1)..(1): xaa in position 1 is Ala or Thr
  MISC_FEATURE (2)..(2): xaa in position 2 is Ile, Val, Thr or Leu
  MISC_FEATURE (3)..(3): xaa in position 3 is Asp or Asn
  MISC_FEATURE (5)..(5): xaa in position 5 is Leu or Met
  MISC_FEATURE (6)..(6): xaa in position 6 is Asp or Ala
  MISC_FEATURE (7)..(8): xaa in position 7 to 8 is any amino acid
  MISC_FEATURE (10)..(10): xaa in position 10 is Val, Ile or Gly
  MISC_FEATURE (11)..(11): xaa in position 11 is any amino acid
  MISC_FEATURE (12)..(12): xaa in position 12 is Ile or Val
  MISC_FEATURE (13)..(15): xaa in position 13 to 15 is any amino acid
  MISC_FEATURE (16)..(16): xaa in position 16 is any or no amino acid
  MISC_FEATURE (18)..(18): xaa in position 18 is Phe, Thr or Met
  MISC_FEATURE (19)..(19): xaa in position 19 is any amino acid
  MISC_FEATURE (20)..(20): xaa in position 20 is Gly or Ala
  MISC_FEATURE (21)..(21): xaa in position 21 is Tyr or Ser
  MISC_FEATURE (22)..(23): xaa in position 22 to 23 is any amino acid
  MISC_FEATURE (25)..(25): xaa in position 25 is Arg, Lys or Leu
  MISC_FEATURE (26)..(28): xaa in position 26 to 28 is any amino acid
  MISC_FEATURE (29)..(29): xaa in position 29 is any or no amino acid
  MISC_FEATURE (30)..(30): xaa in position 30 is Asn, Thr, Met or Glu
  MISC_FEATURE (31)..(31): xaa in position 31 is Gly, Phe, Thr or Tyr
  MISC_FEATURE (32)..(32): xaa in position 32 is Trp, Leu or Cys
  MISC_FEATURE (33)..(33): xaa in position 33 is Pro or Gln
  MISC_FEATURE (34)..(34): xaa in position 34 is any amino acid
  MISC_FEATURE (35)..(35): xaa in position 35 is Met, Leu, Arg or Val
  MISC_FEATURE (36)..(36): xaa in position 36 is Leu or Trp
  MISC_FEATURE (39)..(39): xaa in position 39 is Lys or Glu
  MISC_FEATURE (40)..(40): xaa in position 40 is Asp or Gly
  MISC_FEATURE (42)..(42): xaa in position 42 is Pro or Leu
  MISC_FEATURE (43)..(43): xaa in position 43 is Pro or Ser
  MISC_FEATURE (44)..(44): xaa in position 44 is Ser, Pro, Ala or Thr
  MISC_FEATURE (45)..(45): xaa in position 45 is Ser, Asp, Asn or Lys
  MISC_FEATURE (46)..(46): xaa in position 46 is any amino acid
  MISC_FEATURE (47)..(47): xaa in position 47 is Phe or Ser
  MISC_FEATURE (48)..(48): xaa in position 48 is Glu, Lys, Asp or Asn
  MISC_FEATURE (49)..(50): xaa in position 49 to 50 is any amino acid
  MISC_FEATURE (51)..(51): xaa in position 51 is Leu, Ile or Phe
  MISC_FEATURE (52)..(52): xaa in position 52 is Pro, Phe or Leu
  MISC_FEATURE (53)..(53): xaa in position 53 is Arg, Tyr or Asn
  MISC_FEATURE (54)..(54): xaa in position 54 is His or Gln
  MISC_FEATURE (55)..(55): xaa in position 55 is any amino acid
  MISC_FEATURE (56)..(56): xaa in position 56 is Ala, Asp, Pro or Glu
  MISC_FEATURE (58)..(58): xaa in position 58 is Phe or Ile
  MISC_FEATURE (59)..(59): xaa in position 59 is Ile, Leu or Thr
  MISC_FEATURE (60)..(61): xaa in position 60 to 61 is any amino acid
  MISC_FEATURE (62)..(62): xaa in position 62 is Leu or Phe
  MISC_FEATURE (64)..(64): xaa in position 64 is Phe, Leu or Ile
  MISC_FEATURE (65)..(65): xaa in position 65 is any amino acid
  MISC_FEATURE (66)..(66): xaa in position 66 is Glu, Asp, His or Gln
  MISC_FEATURE (68)..(68): xaa in position 68 is Thr, Ser, Ile or Met
  MISC_FEATURE (69)..(69): xaa in position 69 is His or Asp
  MISC_FEATURE (70)..(70): xaa in position 70 is Pro or Ser
  MISC_FEATURE (71)..(71): xaa in position 71 is Arg, Lys or Val
  MISC_FEATURE (72)..(72): xaa in position 72 is any amino acid
  MISC_FEATURE (74)..(74): xaa in position 74 is Ile, Leu or Pro
  MISC_FEATURE (77)..(77): xaa in position 77 is Leu, Ile or Val
  MISC_FEATURE (79)..(79): xaa in position 79 is Thr, Ala or Val
  MISC_FEATURE (80)..(80): xaa in position 80 is Lys, Asn or Arg
  MISC_FEATURE (81)..(81): xaa in position 81 is Leu or Phe
  MISC_FEATURE (83)..(84): xaa in position 83 to 84 is any amino acid
  MISC_FEATURE (85)..(85): xaa in position 85 is any or no amino acid
  MISC_FEATURE (86)..(86): xaa in position 86 is Leu, Gln, Ile or Ser
  MISC_FEATURE (87)..(87): xaa in position 87 is Lys, Gln or Pro
  MISC_FEATURE (88)..(88): xaa in position 88 is Pro or Asn
  MISC_FEATURE (90)..(90): xaa in position 90 is any amino acid
  MISC_FEATURE (93)..(93): xaa in position 93 is Lys or Cys
  MISC_FEATURE (94)..(94): xaa in position 94 is Thr, Ile or Leu
  MISC_FEATURE (95)..(95): xaa in position 95 is Tyr or Asn
  MISC_FEATURE (96)..(96): xaa in position 96 is Ile or Val
  MISC_FEATURE (97)..(97): xaa in position 97 is Ala or Ser
  MISC_FEATURE (98)..(98): xaa in position 98 is Tyr, Cys or Ser
  MISC_FEATURE (99)..(99): xaa in position 99 is Gly or Arg
  MISC_FEATURE (100)..(101): xaa in position 100 to 101 is any amino acid
  MISC_FEATURE (102)..(102): xaa in position 102 is Asp, Glu or Gln
  MISC_FEATURE (104)..(104): xaa in position 104 is Leu, Ile, Tyr or Met
  MISC_FEATURE (105)..(105): xaa in position 105 is Gly, Ser, Ala or Asn
  MISC_FEATURE (106)..(106): xaa in position 106 is Arg, Ala or Gln
  MISC_FEATURE (107)..(107): xaa in position 107 is Gly or Pro
  MISC_FEATURE (110)..(110): xaa in position 110 is Val or Leu
  MISC_FEATURE (111)..(111): xaa in position 111 is Thr or Lys
  MISC_FEATURE (112)..(112): xaa in position 112 is Lys, Gly or Asn
  MISC_FEATURE (113)..(113): xaa in position 113 is Leu or Ile
  MISC_FEATURE (114)..(114): xaa in position 114 is His or Gly
  MISC_FEATURE (115)..(115): xaa in position 115 is Cys, Phe or Tyr
  MISC_FEATURE (116)..(116): xaa in position 116 is Asp, Asn or Glu
  MISC_FEATURE (117)..(117): xaa in position 117 is Met, Ile or Thr
  MISC_FEATURE (118)..(118): xaa in position 118 is Ser, Arg or Cys
  MISC_FEATURE (120)..(120): xaa in position 120 is Ala or Met
  MISC_FEATURE (121)..(121): xaa in position 121 is Val or Gly
XXXCXXXXEXXXXXXXFXXXXXXGXXXXXXXXXXXXKLXXWXXXXXXXXXXXXXXXEXXXXXPXXXYXXXXXGXLNXAXXXPXXXXXXDXGPXXXXXXXXXXEXXXXDSXXXXXXXXXDXX

SEQ ID NO: 281 - protein, 93 aa, Unknown
  Consensus sequence
  MISC_FEATURE (1)..(1): xaa in position 1 is Tyr or Phe
  MISC_FEATURE (3)..(3): xaa in position 3 is Thr, Asn, Asp or Ser
  MISC_FEATURE (4)..(5): xaa in position 4 to 5 is any amino acid
  MISC_FEATURE (6)..(6): xaa in position 6 is His or Gln
  MISC_FEATURE (7)..(7): xaa in position 7 is Lys or Ile
  MISC_FEATURE (8)..(8): xaa in position 8 is Arg, Lys, Ala or Met
  MISC_FEATURE (9)..(9): xaa in position 9 is Lys, Gln or Arg
  MISC_FEATURE (11)..(11): xaa in position 11 is Lys or Arg
  MISC_FEATURE (12)..(12): xaa in position 12 is any amino acid
  MISC_FEATURE (14)..(14): xaa in position 14 is Phe, Tyr or His
  MISC_FEATURE (15)..(15): xaa in position 15 is Gly or Asp
  MISC_FEATURE (16)..(19): xaa in position 16 to 19 is any or no amino acid
  MISC_FEATURE (20)..(20): xaa in position 20 is Val or Ile
  MISC_FEATURE (24)..(24): xaa in position 24 is Thr or Ser
  MISC_FEATURE (26)..(26): xaa in position 26 is Glu, Val, Asp or Asn
  MISC_FEATURE (28)..(28): xaa in position 28 is His, Lys, Cys or Asn
  MISC_FEATURE (29)..(29): xaa in position 29 is Leu, Arg or Val
  MISC_FEATURE (31)..(31): xaa in position 31 is Glu or Asp
  MISC_FEATURE (33)..(33): xaa in position 33 is Val or Ile
  MISC_FEATURE (34)..(34): xaa in position 34 is Phe, Ile or Leu
  MISC_FEATURE (35)..(35): xaa in position 35 is Ile, Leu or Val
  MISC_FEATURE (37)..(37): xaa in position 37 is Ala or Val
  MISC_FEATURE (41)..(41): xaa in position 41 is His, Phe or Tyr
  MISC_FEATURE (43)..(43): xaa in position 43 is Val, Ile, Ala or Ser
  MISC_FEATURE (44)..(44): xaa in position 44 is any amino acid
  MISC_FEATURE (45)..(50): xaa in position 45 to 50 is any or no amino acid
  MISC_FEATURE (51)..(51): xaa in position 51 is Lys, Gln or Asn
  MISC_FEATURE (52)..(52): xaa in position 52 is Val, Ala or Leu
  MISC_FEATURE (53)..(53): xaa in position 53 is Ala, Val or Gly
  MISC_FEATURE (54)..(54): xaa in position 54 is Leu, Val or Met
  MISC_FEATURE (55)..(55): xaa in position 55 is Asp or Lys
  MISC_FEATURE (57)..(57): xaa in position 57 is Val or Leu
  MISC_FEATURE (58)..(58): xaa in position 58 is Ser, Cys or Ala
  MISC_FEATURE (61)..(61): xaa in position 61 is Asn, Ser or His
  MISC_FEATURE (62)..(62): xaa in position 62 is Val or Ile
  MISC_FEATURE (63)..(63): xaa in position 63 is any amino acid
  MISC_FEATURE (64)..(64): xaa in position 64 is Glu or Asp
  MISC_FEATURE (65)..(65): xaa in position 65 is Cys, Ser or Ala
  MISC_FEATURE (66)..(66): xaa in position 66 is Leu, Val, Ala or Ile
  MISC_FEATURE (67)..(67): xaa in position 67 is Arg, Lys or Gln
  MISC_FEATURE (68)..(68): xaa in position 68 is Leu or Arg
  MISC_FEATURE (69)..(69): xaa in position 69 is Thr, Ala or Val
  MISC_FEATURE (70)..(70): xaa in position 70 is any amino acid
  MISC_FEATURE (71)..(71): xaa in position 71 is Glu or Gln
  MISC_FEATURE (72)..(72): xaa in position 72 is Phe, Ile, Leu or Tyr
  MISC_FEATURE (73)..(73): xaa in position 73 is Arg or Asn
  MISC_FEATURE (74)..(74): xaa in position 74 is Gln, Cys, Leu or Arg
  MISC_FEATURE (75)..(75): xaa in position 75 is Leu or Val
  MISC_FEATURE (77)..(78): xaa in position 77 to 78 is any amino acid
  MISC_FEATURE (79)..(79): xaa in position 79 is His or Val
  MISC_FEATURE (80)..(80): xaa in position 80 is any amino acid
  MISC_FEATURE (81)..(81): xaa in position 81 is Ala or Ser
  MISC_FEATURE (82)..(82): xaa in position 82 is Lys, Arg or Ser
  MISC_FEATURE (83)..(83): xaa in position 83 is Glu, Leu or Ala
  MISC_FEATURE (84)..(84): xaa in position 84 is Asp, Gln or Asn
  MISC_FEATURE (85)..(85): xaa in position 85 is Lys, Ile or Val
  MISC_FEATURE (86)..(86): xaa in position 86 is Leu or Ile
  MISC_FEATURE (87)..(87): xaa in position 87 is Glu or Gly
  MISC_FEATURE (88)..(88): xaa in position 88 is Ile, Val, Ala or Leu
  MISC_FEATURE (89)..(89): xaa in position 89 is Lys, Gly or Ser
  MISC_FEATURE (90)..(90): xaa in position 90 is Lys or Leu
  MISC_FEATURE (91)..(91): xaa in position 91 is Met, Ile or Leu
  MISC_FEATURE (92)..(92): xaa in position 92 is Ala, Ser, Val or Ile
  MISC_FEATURE (93)..(93): xaa in position 93 is Leu, Ile, Phe or Val
XLXXXXXXXLXXEXXXXXXXEPWXFXQXXGXAXXXPXGCPXQXXXXXXXXXXXXXFXXPEXXXXXXXXXXXXXXXPXXXXXXXXXXXXXXXXX

SEQ ID NO: 282 - DNA, 1632 bp, Arabidopsis thaliana
  CDS (137)..(1264)
ggagagtaacatcgagacaaagaagaaaaactaaaaaagagaaccccaaagaatcgaatatttattatttcgccccgaagattctatttctgatcatttacacccctaaaaagagtagagctttcgtgaagccaccatgtgtggaggagctataatctccgatttcatacctccgccgaggtccctccgcgtcactaacgagtttatctggccggatctgaaaaacaaagtgaaagcttcaaagaagagatcgaataagcgatccgatttcttcgatcttgacgatgatttcgaagctgatttccaagggtttaaggatgactcggcttttgactgcgaagacgatgatgatgtcttcgtcaatgttaagcctttcgtcttcaccgcaactactaagcccgtagcttccgctttcgtctccactgtaggttcagcatatgccaagaaaactgtagagtccgctgagcaagctgagaaatcttctaagaggaagaggaagaatcaataccgagggattaggcagcgtccttggggaaaatgggctgcggagatccgtgatccgagaaaaggctcccgagaatggcttggaacattcgacactgctgaggaagcagcaagagcttatgatgctgcagcacgcagaatccgtggcacgaaagctaaggtgaattttcccgaggagaagaaccctagcgtcgtatcccagaaacgtcctagtgctaagactaataatcttcagaaatcagtggctaaaccaaacaaaagcgtaactttggttcagcagccaacacatctgagtcagcagtactgcaacaactcctttgacaactcttttggtgatatgagtttcatggaagagaagcctcagatgtacaacaatcagtttgggttaacaaactcgttcgatgctggaggtaacaatggataccagtatttcagttccgatcagggcagtaactccttcgactgttctgagttcgggtggagtgatcacggccctaaaacacccgagatctcttcaatgcttgtcaataacaacgaagcatcatttgttgaagaaaccaatgcagccaagaagctcaaaccaaactctgatgagtcagacgatctgatggcataccttgacaacgccttgtgggacaccccactagaagtggaagccatgcttggcgcagatgctggtgctgtgactcaggaagaggaaaacccagtggagctatggagcttagatgagatcaatttcatgctggaaggagacttttgaagtgatcgatggttccttagtttgtaaataaagctgtgttggattttgctgttgggggatggtacaagtcacacctcaagctctatgcattggtatctcatgagcctctcttccatagagagtttctcttttaattttgtcgaaataaaaaaggtgtgatgaagtaaatagaggtataataatatctatctattaagtcttgttttgttctttcatttttgtatttcttttctatttaaaagacagtttattagtcttctgagctctctttttgatctttgttatagcgtatcatcaccctcgaaagtgtaatgttttgtacccccaaacttgtttagcattataataaagtctctttggaacttctc

SEQ ID NO: 283 - protein, 375 aa, Arabidopsis thaliana
MCGGAIISDFIPPPRSLRVTNEFIWPDLKNKVKASKKRSNKRSDFFDLDDDFEADFQGFKDDSAFDCEDDDDVFVNVKPFVFTATTKPVASAFVSTVGSAYAKKTVESAEQAEKSSKRKRKNQYRGIRQRPWGKWAAEIRDPRKGSREWLGTFDTAEEAARAYDAAARRIRGTKAKVNFPEEKNPSVVSQKRPSAKTNNLQKSVAKPNKSVTLVQQPTHLSQQYCNNSFDNSFGDMSFMEEKPQMYNNQFGLTNSFDAGGNNGYQYFSSDQGSNSFDCSEFGWSDHGPKTPEISSMLVNNNEASFVEETNAAKKLKPNSDESDDLMAYLDNALWDTPLEVEAMLGADAGAVTQEEENPVELWSLDEINFMLEGDF

SEQ ID NO: 284 - DNA, 840 bp, Brassica napus
  CDS (1)..(735)
atgattggcggtgctatcatatccgattttgttcctatcctcaccaaggccaagggtaggaaactcacggcggaggaactctggtctgagctcgatgcttccgccggcgactatttatggagtttccatcccacctccaagcttcaacccaccaaccaacaagaagtggcgttgaaagatgaggcggtggtgaaggagaaggagagggagccagcgacgacggagaaacgggggaggaagaggaagaacgtttacagagggatacgtaggcgtccgtggggaaaatgggcttcagagatacgagatccacggaaaggcaccagagtctggctcgggacgttcaacacggcggaggaagccgccatggcttatgacgtagctgctaagcgtatccgcggcgataaagccaagctcaacttccctgatcttattcctcctccgctgacatcacccccagtgtcagacgatcagcctccggcgaagaagctctgtgtactctctcagagcgagttaactcagccgagtttcccggtcgagtgcattgggttcgggaacggtgaccagtttcagaaccggagttacgggtttgagcttgattacgatcttaaacagcagatatcgagcttggagtctttccttgagcttgacggtggtaccacgggggagcagccgagtcagctcgacgagtcagtggatgtgtggatgattgatgatgtcatctcatcgtatgcataaaataaagtaaatgtaataagtgaaaatcaaataaagtctgtaatatatggaacatatgtaaccgccgttactttctaaggctttttaccagaaaaaaaaaaaaaa

SEQ ID NO: 285 - protein, 244 aa, Brassica napus
MIGGAIISDFVPILTKAKGRKLTAEELWSELDASAGDYLWSFHPTSKLQPTNQQEVALKDEAVVKEKEREPATTEKRGRKRKNVYRGIRRRPWGKWASEIRDPRKGTRVWLGTFNTAEEAAMAYDVAAKRIRGDKAKLNFPDLIPPPLTSPPVSDDQPPAKKLCVLSQSELTQPSFPVECIGFGNGDQFQNRSYGFELDYDLKQQISSLESFLELDGGTTGEQPSQLDESVDVWMIDDVISSYA

SEQ ID NO: 286 - DNA, 1006 bp, Brassica napus
  CDS (15)..(752)
acaaacaagagaatatgtgtggcggtgctgtaatttccgattttgcccctagcgtcaccaaggccaagggtaggaaactcacggcggaggagctttggtcagagcttgatgcttctgcctgtgatgatttttggggttttgactccaccttcaagcttcattccaccaaacaacaagtgacgttgaaagatgaggcggcgaacaaggagaaggagccggcggcgacggagaaacggaaggagaggaagaacgtctacagagggatacgtaagcgtccatggggaaaatgggcgtcagagattcgagacccagaaaaaggcgctagagtctggcttggtacgttcaacacggcggaggaagccgccatggcctatgacgtggcggcgaagcgtatccgcggcgataaagccaaactcaacttcccggatctccttcataaccctcctcagatgctgccatcatctccacgaccggaagatcagcctccggtgaagaagctatgtgtttcccctcagagcgagttgactcagtctagtttcccggtggagtgcattgggttcgggaatggagacgagtttcagaacatgagttgcggttttggaccggactacgatctcaaacagcagatatcgagcttggagtatttccttgagctggacggtaccacaccggagcagccgagtcagctcgacgagtccgggtccgaggttgatttatggatgtttgatgatgtcatcgcgtcgtatggataaaaacataaaattaatgagtgaaaaaataaaggctgtaatataaaccgccgttacttttcaaggttttaccattgcatggaattgctaatgatatatgctgtggtttgtaatgtgtgtgggcgttattgcgactcaaatcgagcgttgtatcaaaggttcgtggtattgctattttattttctggaaaataactacttgtgtaaatacagatttgtaataaatgacccgattgttatacgtaaaaaaaaaaaaaa

SEQ ID NO: 287 - protein, 245 aa, Brassica napus
MCGGAVISDFAPSVTKAKGRKLTAEELWSELDASACDDFWGFDSTFKLHSTKQQVTLKDEAANKEKEPAATEKRKERKNVYRGIRKRPWGKWASEIRDPEKGARVWLGTFNTAEEAAMAYDVAAKRIRGDKAKLNFPDLLHNPPQMLPSSPRPEDQPPVKKLCVSPQSELTQSSFPVECIGFGNGDEFQNMSCGFGPDYDLKQQISSLEYFLELDGTTPEQPSQLDESGSEVDLWMFDDVIASYG

SEQ ID NO: 288 - DNA, 1041 bp, Brassica napus
  CDS (29)..(829)
ccatcttcctccgatcctctgttctctaatggccacgccaagcgaaacatcagctcttttcttcatcaagaagtatctcctcgacgaattatccccgttgcctaatgccaccactaccaatccatgggaaaccagctccgatttttcattcttcggttcatttgaccaaaccggtttcgattttcctgaattcgagactaaaccggaaataaccgatactccacttgcaccaaacgattccttcacgttccaatcgaatcctccggtcgtctcgcaatcgaatcgaaaaccgccgctgaagatcgcgccgccgaacagatccgagtggatccaattcgcagccggaaagcctcagcgagaacaggttcccttaccacaggtggccgcggaagagaagaggcactacagaggagtgaggatgaggccgtgggggaaattcgcggcggagatcagagatccgacccgccgcggaaccagggtgtggctcgggacgttcgacacggcgatcgaagcggcgagggcttacgaccaagcggcgtttaggctccgaggagctaaggccatcgtgaatttcccgctcgaggttgggatgtgggagccacgcgctgagaatggtcagaacaaacggaagcgagacggagctgaggaggaagaaacgagggttgttgcgaaagttgtgaagacggaggagagtcacggcgttgagcaagtgacgtcgagtttgacgggggtagatgactgggacttgacggagtttctaagcatgccgcttttctcgccgttgtcaccacatccaccgtttggttatccacaattgactgttgtctaaatgtctgttgggttcagcttgctgtatgctgacgtggaattactacggcgtacacgtgttttttatgatctcttgattctttttgttgcacacacattcgggaaaattttattcatttatttgttctttgtataatacgactttcaagtttcaacatgcagtcaataaaatcatatcgaaataacaaaaaaaaaaaataaaaaaaaaaaaaa

SEQ ID NO: 289 - protein, 266 aa, Brassica napus
MATPSETSALFFIKKYLLDELSPLPNATTTNPWETSSDFSFFGSFDQTGFDFPEFETKPEITDTPLAPNDSFTFQSNPPVVSQSNRKPPLKIAPPNRSEWIQFAAGKPQREQVPLPQVAAEEKRHYRGVRMRPWGKFAAEIRDPTRRGTRVWLGTFDTAIEAARAYDQAAFRLRGAKAIVNFPLEVGMWEPRAENGQNKRKRDGAEEEETRVVAKVVKTEESHGVEQVTSSLTGVDDWDLTEFLSMPLFSPLSPHPPFGYPQLTVV

SEQ ID NO: 290 - DNA, 922 bp, Brassica napus
  CDS (59)..(793)
ccaaactcatctctctcttgaaacccagcataagagtgaaataaaagaaacagagaaaatgtgtggcggtgctatcatatccgattttgttcctatcctcaccaaggccaagggtaggaaactcacggcggaggaactctggtctgagctcgatgcttccgccggcgactatttatggagtttccatcccacctccaagcttcaacccaccaaccaacaagaagtggcgttgaaagatgaggcggtggtgaaggagaaggagagggagccagcgacgacggagaaacgggggaggaagaggaagaacgtttacagagggatacgtaggcgtccgtggggaaaatgggcttcagagatacgagatccacggaaaggcaccagagtctggctcgggacgttcaacacggcggaggaagccgccatggcttatgacgtagctgctaagcgtatccgcggcgataaagccaagctcaacttccctgatcttattcctcctccgctgacatcacccccagtgtcagacgatcagcctccggcgaagaagctctgtgtactctctcagagcgagttaactcagccgagtttcccggtcgagtgcattgggttcgggaacggtgaccagtttcagaaccggagttacgggtttgagcttgattacgatcttaaacagcagatatcgagcttggagtctttccttgagcttgacggtggtaccacgggggagcagccgagtcagctcgacgagtcagtggatgtgtggatgattgatgatgtcatctcatcgtatgcataaaataaagtaaatgtaataagtgaaaatcaaataaagtctgtaatatatggaacatatgtaaccgccgttactttctaaggctttttaccattacatggaactgatgatgatgattaaaaaaaaaaaaaa

SEQ ID NO: 291 - protein, 244 aa, Brassica napus
MCGGAIISDFVPILTKAKGRKLTAEELWSELDASAGDYLWSFHPTSKLQPTNQQEVALKDEAVVKEKEREPATTEKRGRKRKNVYRGIRRRPWGKWASEIRDPRKGTRVWLGTFNTAEEAAMAYDVAAKRIRGDKAKLNFPDLIPPPLTSPPVSDDQPPAKKLCVLSQSELTQPSFPVECIGFGNGDQFQNRSYGFELDYDLKQQISSLESFLELDGGTTGEQPSQLDESVDVWMIDDVISSYA

SEQ ID NO: 292 - DNA, 1352 bp, Glycine max
  CDS (193)..(1101)
atttttgatccctcaaagctaatttctctctctctttttttatttccgggactgaagaggttgtctatttgaaatctccttcatcctttcctttcttgtagaaaactttttaaatttttttgtcagtgggtgttttaattaaccacctgttcttcaagttttagaaagacgcaggttgaattaattagtatcatggcagctttgatggatttttacagcagcagcccagagtttcaacttcactcagatccattcaggggagaactaatggaagttcttgaaccttttatgaaaagtccttctcccaactatttcccttcctccccctccctccctaatctttactcaaacgggttatccagcaacacccaaagcttaattggcttcgggcaagcgcaacccacatctcttgtgggcctgaaccacctaaccccatctcagatctctcagatccaagcccaaatccagatccaggcccagcagcatcagaatcgcagcaacaccctgagcttccttgggccgaagcccatccccatgaagcacgcgggcatgcctccgaagcccacgaagctttacagaggggtgagacagaggcactggggaaagtgggtggctgagatcagacttcccaagaaccggaccaggctgtggctgggaaccttcgacaccgccgaggaagccgctctggcatacgacaaggccgcgtacaagctccgaggtgacttcgccaggctcaacttcccaaacctgcgacaccagggttcctccgtcggtggtgatttcggggagtacaagcctcttcattccgctgttgacgccaagcttcaggccatttgcgaaggcctggctgagctgcagaaacaggggaagaccgagaagcctccgaggaagtcgcgttccaaactcgcggagaaggttgtttccgacaaggagaacaacaactcttgtaaggtggaagctgcgtcctggtcgtcggaaggttcttcgccgctttcggatctgacgtttgctgacgtgagcgaggctcagtgggaaggtgattcggataattataatctccagaagtacccctcttatgagatcgattgggattctctgtgaagtgtcctattatgtatggtctagtctaggtcttagtgtctcttaggtggctgctactgcaatggagtttttggcaattgcagggctagtactattctgtgtataatctctctaccttgctcacagctggtttttttcttgcttgaccagggagaattagtccgcttaatatgtttttcaagtgcatcgctgtaatctacttcaatttcatcatcttataaaatatattattctaccaaaaaaaaaaaaaa

SEQ ID NO: 293 - protein, 302 aa, Glycine max
MAALMDFYSSSPEFQLHSDPFRGELMEVLEPFMKSPSPNYFPSSPSLPNLYSNGLSSNTQSLIGFGQAQPTSLVGLNHLTPSQISQIQAQIQIQAQQHQNRSNTLSFLGPKPIPMKHAGMPPKPTKLYRGVRQRHWGKWVAEIRLPKNRTRLWLGTFDTAEEAALAYDKAAYKLRGDFARLNFPNLRHQGSSVGGDFGEYKPLHSAVDAKLQAICEGLAELQKQGKTEKPPRKSRSKLAEKVVSDKENNNSCKVEAASWSSEGSSPLSDLTFADVSEAQWEGDSDNYNLQKYPSYEIDWDSL

SEQ ID NO: 294 - DNA, 1333 bp, Glycine max
  CDS (136)..(1038)
gttacagataaaaaccctttcttgaaacctttctccaaaatttctcacaacccacttctactctactcattccacacccaacttacaaaaacccattcttttgctcactcattttcttaacgtagattaatcattatgtgtggcggtgccatcatcgctgacttcataccccgccgtggaggccgccgcctcacggcctccgagctctggccaaactccttcgccaaagacgatgactttgacttggattactcccacatcgctacccaacaaccctccactctcaaaaggtcccaacctcccaaagttagcgagcaggttgagaataagccggtgaagaggcagaggaagaatctctacagagggattcggcagcgtccgtggggcaaatgggccgcggagattcgcgatcctagaaaaggggttcgtgtctggttgggcacctttaacaccgcagaagaagccgcgagagcctacgatcgtgaagctcgaaaaatccgaggcaaaaaggctaaggtgaatttccccaacgaggacgacgaatattccattcaagctcgtaatccaattccaccccttcctttcgctccacaacaccctcccctgtaccagcaacagtaccgttgcgatctcaacaatgcccctaaaaatctcaactttgagttcggttacgacctgaaccacgcggaggcgttcccatcccgcgtggacgccgtcaacgctgactcggtggttgtctccgttgatgaaaattcggggtcagcgtcgggttcagagggtgcttattcgacaacggagttcatggggtccgttcagaacgggaacggttatttgggtggcacggtaatggagaagaaggagaaagagacagaggttattgaagctgaagaagaaaagaacaaagtgctggagctttctgaggagctgatggcgtacgaaaattacatgaagttttatcagattccgtactatgatggacaatccacgacgaataatgttcaggaaagcttggttggggatctctggagtttcgattagcgaggaatatatcaaggatgttcttttcatgcatgtgttttgtttcttcgtcaatgctgtgaaagcttttgctttctccctccattctgctgactaaactaacatctctggcgttttggcagggatgcacaggaatttaaattgagtgcttcggtagaaatggtctcattagttagtgctatgctatcatctggttttgttgaattgtaattttttgttttggtggtatgttgaacagtaattttactggatatattcaagtctatttgaattccaattccaaaaaaaaaaaaaa

SEQ ID NO: 295 - protein, 300 aa, Glycine max
MCGGAIIADFIPRRGGRRLTASELWPNSFAKDDDFDLDYSHIATQQPSTLKRSQPPKVSEQVENKPVKRQRKNLYRGIRQRPWGKWAAEIRDPRKGVRVWLGTFNTAEEAARAYDREARKIRGKKAKVNFPNEDDEYSIQARNPIPPLPFAPQHPPLYQQQYRCDLNNAPKNLNFEFGYDLNHAEAFPSRVDAVNADSVVVSVDENSGSASGSEGAYSTTEFMGSVQNGNGYLGGTVMEKKEKETEVIEAEEEKNKVLELSEELMAYENYMKFYQIPYYDGQSTTNNVQESLVGDLWSFD

SEQ ID NO: 296 - DNA, 1350 bp, Glycine max
  CDS (159)..(1016)
agagatgtgtggaggcgctatcatctctgacttcattctcctttttgagacttctaatatcctcagggttttttgggagaattggctaaaaaatggttatatgatccgtgtttgtgctatgatgttatttttattttttctttgtttaatggttctgaatgtctctgttcttactgcgatttttacacttttccaattatattaaagggtctaccacagcgaaatctgtggcattccaagttcgagctgagaaatttgcaaataggaagaggaaaaatcagtataggggaatccgtcaacgcccttggggaaaatgggcagctgagattcgggatcctagaaagggggttcgtgtctggcttggaaccttcaacactgctgaagaagctgcaagagcttatgatgctgaagcacggaggattcgtggcaagaaagccaaggtgaattttcctgaggaggcaccaggtacttctgtaaaacgttccaaggtaaatccacaggaaaatctgagtcacaagttcggtgctggcaacaatcacatggatctggtggaacagaaacccctatttaatcagtatgctaacatggcttccttccctggaagtggaaatgggctcacatcccttccgtcatctgatgatgtcaccctttacttcagttcagatcaggggagtaattcatttgggtggagtgaacagggccccaaaactcctgagatctcatccatgctttctgctcctttggattgtgaatctcattttgtgcaaaatgccaaccagcagcctaactctcagaatgtggtatctatggaagatgattctgcaaagagactctctgaggagcgtgtggatatcgaatctgagttgaagttctttcagatggcttatcttgaagggagctggggcgatacttcgttggaatccttgctatctggtgacacaactcaggatggtggaaacctcatgaacctttggagctttgatgacattccttccatgtctagcggagttttctgaacagctttttctttggtcttcctgtgtataaataaagctacaaattatttttcattttccttctgggttcattaattttgtttttggtttttgttgcatttattgctctcttgttggacacatctccatgtgtctgaaaaaaaaagaatgttatttccatttctgttgccttctggaatggttgtcatctgtgttgaagatggagttaaaacaatttatttaggtgctctttgccttgtcaaagaccttagttttggggaatctcgattgatgttcgagggtgattatatatgatctgtgaaacaatcttggctgctgataaaaaaaaaaaaaa

SEQ ID NO: 297 - protein, 285 aa, Glycine max
MSLFLLRFLHFSNYIKGSTTAKSVAFQVRAEKFANRKRKNQYRGIRQRPWGKWAAEIRDPRKGVRVWLGTFNTAEEAARAYDAEARRIRGKKAKVNFPEEAPGTSVKRSKVNPQENLSHKFGAGNNHMDLVEQKPLFNQYANMASFPGSGNGLTSLPSSDDVTLYFSSDQGSNSFGWSEQGPKTPEISSMLSAPLDCESHFVQNANQQPNSQNVVSMEDDSAKRLSEERVDIESELKFFQMAYLEGSWGDTSLESLLSGDTTQDGGNLMNLWSFDDIPSMSSGVF

SEQ ID NO: 298 - DNA, 975 bp, Brassica napus
  CDS (20)..(745)
aaaaaagcaaacagagaaaatgtgtggcggtgctataatttccgattttgcccctaacgtcaccaaggctaagggtaggaaactcacggcggaggaactctggtcagagctcgatgcttccgccgccgacgatttctggggtttccattccacatccaagactcaatccaccaaccaacaagtgacgttgaaagaggaggcggcggagaaggagaaggagccggtgacggagaaacggaggaagaggaagaacgtttacagagggatacgtaagcgaccgtggggaaaatgggcgtcagagattcgagatccaagaaaaggcgccagagtctggctcgggacgttcaacacggcggaggaagccgccatggcttacgacgttgcggcgaagcggatccgcggcgataaagccaaactcaacttcccagatcttctccaccatcctcctcgtagtcctgcgactcctctagcatcgtctccagtgtcagaagttcagcctccggcgaagaagcactgcgttgtctctcagagcgagttgactcagccgagtttcccggtggagtgcagtggattcgggagcggggacgagtttcaactggactacgatctgaaacagcagatatcgagcttggagtcgttccttgagctggatggtgacacggtggagcaaccgagtcagctcgacgagtccgtctccgaggtggatatgtggatgattgatgatgtcatcgcgtcgtatcagtaaaaaacgtaatataagtagaaatattaaataaagtttgtaatataactgccgttacgttttaaggtttgtaatgtgatgacatgagcgactgatgttattatatgttgtcgttgttaatgtgtggcgccttcttgtgactcatttggagcgttacatttacggtttgtggtattgttattttgttttcttttatggaaaatatatcatgctgtaaacaaaaaaaaaaaaaa

SEQ ID NO: 299 - protein, 241 aa, Brassica napus
MCGGAIISDFAPNVTKAKGRKLTAEELWSELDASAADDFWGFHSTSKTQSTNQQVTLKEEAAEKEKEPVTEKRRKRKNVYRGIRKRPWGKWASEIRDPRKGARVWLGTFNTAEEAAMAYDVAAKRIRGDKAKLNFPDLLHHPPRSPATPLASSPVSEVQPPAKKHCVVSQSELTQPSFPVECSGFGSGDEFQLDYDLKQQISSLESFLELDGDTVEQPSQLDESVSEVDMWMIDDVIASYQ

SEQ ID NO: 300 - DNA, 1322 bp, Glycine max
  CDS (4)..(960)
agcatgacaacatttatggacatgtacaacactactagtagcatcatgacaccggatttcttagaccagtgtagtgatcaagagctgatgaaagcacttgagccttttatgaaaagtgattcatctagcactacttcctcatcaataacaacatacccttcattctcttctttttcttcttctcccaacttgtcctcaacaacatggagcacccaattttgctcctcaagctaccaccaaaagggtccaactccaacccaagctagttccttcaaactgaaccaactcaccccatcacaaatatttcaaattcaaacccaaatccaggttccacgagcccagtttctcagcccaaagcccattaccatgaagcacgtgcgggcttcttgttctaattcaaaggccacgaagctttaccgtggggtgaggcagagacactggggcaagtgggtcgctgagatcagactccctaagaaccgcacacgtctctggctcggtacatttgaaaccgcagaggaagcagctttggcttacgacaacgcagcgtttaagctaagaggagaaaacgcgaggctcaacttccctcacctacgtcaccatggagcgcgtgtgtacggtgagtttgggaactacaagcctctcccttctgcggttgatgcgaagctccaagccatttgtcaaagcttagggaccaaattgcagaaactgaaaactgatcaaaaccctgttgtagatgcaaaggttaagaagacatcgaagttcgaggattttaagattgagaaccgaacatcatcatcctcggcgttgtcggatgaatattcttcttcttcttcttcgcccgaatccgatattactttcttggatttctcggattcttgtgaaacaacatgcaatcttgggttggacttggaaaagtatccttccgtggagattgattgggcagctttatctgagtcatgaatgatgttagtggttttgtctttgttgaacggtttaatgatttgatgtgttttaggtttttttttcatgtgtcttgggcagcagctgcaacgaaattttttaccgttgaagcagttgctatgctgagtcaggttgctaactttagtgtactgctgtagatagatgggtcacagcggtttggttattatggttttcttggtctgctggtattttttattcctgcatgaccaagctagcttcaactcttttttttctttttaaattgatagaaaacaaggtagcttcaactacttgtttgtagttcgaatgtaatttaagtgccttaatgcaagttttggaagttcttgcaaaaaaaaaaaaaa

SEQ ID NO: 301 - protein, 318 aa, Glycine max
MTTFMDMYNTTSSIMTPDFLDQCSDQELMKALEPFMKSDSSSTTSSSITTYPSFSSFSSSPNLSSTTWSTQFCSSSYHQKGPTPTQASSFKLNQLTPSQIFQIQTQIQVPRAQFLSPKPITMKHVRASCSNSKATKLYRGVRQRHWGKWVAEIRLPKNRTRLWLGTFETAEEAALAYDNAAFKLRGENARLNFPHLRHHGARVYGEFGNYKPLPSAVDAKLQAICQSLGTKLQKLKTDQNPVVDAKVKKTSKFEDFKIENRTSSSSALSDEYSSSSSSPESDITFLDFSDSCETTCNLGLDLEKYPSVEIDWAALSES

SEQ ID NO: 302 - DNA, 909 bp, Brassica napus
  CDS (1)..(816)
atgcattatcctaacaacagaaccgaattcgtcggagctccagcttcagactcgacccggaacaggtatcaacagaaggagcagttgtcaccagagcaagagctctcggttatagtctccgccttgcaacacgtcatctcagggggaaacgatacgacgccgtatcagggattctcaagcaataacacaatgataagcgcgggaatgcatcccgacacgtgccaagtgtgcaggatcgatggttgtttaggctgtaactactttttcgcgccaaatcagagaatcgaaaataaacaacaagtagaggtagaagaaggggatactagtaagagtagtggaagagagagcacggtggcggcgacggcggcggcggcgacggggaagataaggaggaggaagaacaagaagaatgggtacagaggagtgaggcagaggccttgggggaaattcgcagctgagatcagagatcccaagagagcgacacgtgtttggctaggcactttcgaaacagctgaggacgcggcgagggcctatgatagagcagctattgggttccgtgggccgcgggctaagctcaacttcccctttgtggattacacttcagctactacttcttcctctgttccagctgaggatacaagaacgaatgcaagcgcgagcgtaagcgtaagcgcagcggattctgtggaagcagagcaatggcgtggaggagaaggaggagattgtgatatggaggagtatttgaagatggtgatggattttgggaatggtgattcttctgattcagggaacactattgctgatatgttccagtgatgaataaataaaagattaaattgtagttacaaaggtgtagttactcgttcattaaaacaaaaagaattgattaaaaaacaaaaaaaaaaaaaa

SEQ ID NO: 303 - protein, 271 aa, Brassica napus
MHYPNNRTEFVGAPASDSTRNRYQQKEQLSPEQELSVIVSALQHVISGGNDTTPYQGFSSNNTMISAGMHPDTCQVCRIDGCLGCNYFFAPNQRIENKQQVEVEEGDTSKSSGRESTVAATAAAATGKIRRRKNKKNGYRGVRQRPWGKFAAEIRDPKRATRVWLGTFETAEDAARAYDRAAIGFRGPRAKLNFPFVDYTSATTSSSVPAEDTRTNASASVSVSAADSVEAEQWRGGEGGDCDMEEYLKMVMDFGNGDSSDSGNTIADMFQ

SEQ ID NO: 304 - DNA, 1407 bp, Brassica napus
  CDS (90)..(1136)
agaaccccaaagaagctaatattcacggtttcgccgcaaagtttttatttccgaacatttaacacccctcaaaacagtttaacgccgccatgtgtggaggagctataatctccgaattcatccctccgccgaactcccgccgcgtcaccagcgagtttatctggccggatctgaaaaatctgaagaagaagaagtcgaggaagcgatctgatttcttggatctggacgatgaattcgaggctgatttcaaagggtttaaggatgatgattcgtcttttgactgcgaagatggattcgatgtgaagccctttgccttcaccgcagcttcccttcccaccaacgtcgcctccactggttcagtttctggcaagaaaaccatagagtctgatgagaaatctggcaagaggaagagaaagaatcagtacaggggaattaggctgcgcccatggggaaagtgggccgccgagatccgcgatcctaaaaaaggctcacgagaatggcttggaacgttcgaaaccgctgaggaagctgcaagagcttatgacgcagctgcgcgcaggatccgtggcggtaaagccaaggtgaacttccctgaggaggtgatcagtaatcttaagaagccagtggctaaaccaaaccataccccagctttggttcagccgccaacacatgtgggtcagtactgcaacaacaactcctttgacaacatgggacatgactccttgagttttatcgaggagaagcctcagatgtacaacaatcagttcttcgatgttggacagtatttcagctctgaccagggtagtaactcgtttgactgctctgagtttgggtggagtgatcacgcccccaagacaccaccggagatctcttcaatgctagtcaataacaaccgagctacgtttgatgaagaaaccaacgcagccaagaaggtcaaactcaactctgaggacgagacaagcgacaatgatgatctgatggcgtaccttgacaacgccctgtgggagtctcctttggaaatggaagctatgctcggcgtagatgttgctgctgatggtgtggctcagaaagaggcaaacccaatggagctgtggagcttagatgatatcaactttatgctggatggagacttctgaagtgtttgatgcgttgcctagtttgtaaataaagctgtgtgtgtgtgtgtgttggtgagtttcaagcccattgtgaagacaaacagccgtaacttttacttaatcttcagtttggtttttgtgtttgttgtctcacagggttttgttttgtatccctaagacttgtttaacaagtataataaaaacggtgttggaacctctgttttttttttatgattcttctctctgtttaattggtatatagttcttgtaaactgaaaaaaaaaaaaaa

SEQ ID NO: 305 - protein, 348 aa, Brassica napus
MCGGAIISEFIPPPNSRRVTSEFIWPDLKNLKKKKSRKRSDFLDLDDEFEADFKGFKDDDSSFDCEDGFDVKPFAFTAASLPTNVASTGSVSGKKTIESDEKSGKRKRKNQYRGIRLRPWGKWAAEIRDPKKGSREWLGTFETAEEAARAYDAAARRIRGGKAKVNFPEEVISNLKKPVAKPNHTPALVQPPTHVGQYCNNNSFDNMGHDSLSFIEEKPQMYNNQFFDVGQYFSSDQGSNSFDCSEFGWSDHAPKTPPEISSMLVNNNRATFDEETNAAKKVKLNSEDETSDNDDLMAYLDNALWESPLEMEAMLGVDVAADGVAQKEANPMELWSLDDINFMLDGDF

SEQ ID NO: 306 - DNA, 1589 bp, Brassica napus
  CDS (84)..(1226)
aaatatttcaaaagagaaccccaaagaagctaatacttaccgtttcgccgctaagtttacatttcagagcatttaacaccgccatgtgtggaggagctataatctccgatttcatacctccgtcgaggtcccgccgcgtcacgagcgagtacctctggccggatctgaaaaacaaagtgaaagcttcgaagaagaagaagcgatccgatttcctcgatctggacgacgagttcgaggctgactttcaagggtttaaggatggtgcatcgttcgattgcgaagatgaattcgatgtggatgatgaagtcttcgccgatgtcaaaccctttgtcttcgccgcaggtgccaagcccgtagcgtcccctcccgccgccttcgcctccgctggttcagtttctggcaagaaaaccatagagtctggtggacaagctgagaaatctgccaagagaaagaggaagaatcagtacagggggattaggcagcgcccttggggcaaatgggccgctgagatccgtgatcccagaaaaggctcccgggagtggcttggaacattcgacaccgccgaggaagcagcaagagcttatgatgcagctgcacgcaggatccgcggtaataaagctaaggtgaacttcccagaggagatggtccctagcgtctcccagaaacgccctgctgctaagaaggcagtggctaaaccaaaccaaagcccagcatccgttcagcagccaacacatgtgagtgagtactgcaacaactcctttgacaacatgggacatgacccctcttttggtgatgtgagtttcatggaagagaagcctcagatgtacaacaatcagttccttgatgtcggaggcaacaatggataccagtatttcagttctgaccagggcagtaactcactggactgctctgagtttgggtggagtgatcatacccccaagacacctgagatctcttcaatgctggtcaacagtaaccaagctcctttcattgaagaaaccaatccagccaagaagctcaaaaccaactctgaggacgggacaagcaacaatggtaattctgatgatctgatggcatatttgaacaacgccttgtgggagtctccattggaagtggaagctatgttcggtggtgatgctgctactatgactcaggaagagggaaccccaatggacctatggagcttcgatgatatcaactccatgctggatggtggagtcttctgaaagtgattgatgggttgcctagtttgtaaataaagctctttgtgtgttgggttttgctgttggccgggggaatggtacaagttcatacctggagcttattgcatcgttatcttatatgagtctctttctcacggagagcgtctctcttttaaattcctgaaataaaaggggtgatgaagtaaatagagttataatttctatctaatgagtctgtgagtttttttttttttgtttactaatgtttaaaactctctttttgatctttctttttatagcgtatcatcatcaccctcgaaagtgtttatgttttgtacccccaacactaatataaaaactgtctggaaccaggaaaaaaaaaaaaaa

SEQ ID NO: 307 - protein, 380 aa, Brassica napus
MCGGAIISDFIPPSRSRRVTSEYLWPDLKNKVKASKKKKRSDFLDLDDEFEADFQGFKDGASFDCEDEFDVDDEVFADVKPFVFAAGAKPVASPPAAFASAGSVSGKKTIESGGQAEKSAKRKRKNQYRGIRQRPWGKWAAEIRDPRKGSREWLGTFDTAEEAARAYDAAARRIRGNKAKVNFPEEMVPSVSQKRPAAKKAVAKPNQSPASVQQPTHVSEYCNNSFDNMGHDPSFGDVSFMEEKPQMYNNQFLDVGGNNGYQYFSSDQGSNSLDCSEFGWSDHTPKTPEISSMLVNSNQAPFIEETNPAKKLKTNSEDGTSNNGNSDDLMAYLNNALWESPLEVEAMFGGDAATMTQEEGTPMDLWSFDDINSMLDGGVF

SEQ ID NO: 308 - DNA, 1035 bp, Glycine max
  CDS (125)..(970)
gggattcgatctagtagctaactaaaacaagctttttgattgcgtttacacgtgtttgttaaaggtggcaaatcctaaagagaagaagggaaacgaggttgacaatatattattccatgaagggatgatgaacaaccctgcattattgtcaaggctgtttccgggtatcaatagggagagggagatgtctgccatggtctcagctttgacccacgttgtctccggagaggttccaaccggtgattcttcttcagttcttcatcatcaacctcatgatgatgatgctgttactgttaaaccaaacatgccttctacaacacccttttcatctacttatgttgttgccacctcttctctcaagagaagtagacaacatgatacatatacaccatccttctcacatccaccttcatcattccctgctatgccaacaagtgcagaatgttcaaagagtggaatgggaaatgctgtgtacgaatacagaacaagaggaacagagaatgtaaagaaggaggagggaaggagaaaatatagaggggtgaggcagaggccgtggggaaaatgggcagcggagataagagacccattcaaagcagcaagagtatggttaggaacatttgagacggcagaggcagcagctagagcctacgatgaagctgcccttcgttttaggggcagcaaggccaaactcaacttccccgagaatgtcactctccgacaacctcaattcactgtttccacatcaacagacccatttcaactctcgggtaccaacctttatgatcataggatgtttctgacttctaataccatggcttctcatcatcttcaatcttctttgccgctgccaccagcaacctcctcttctctaacttctcctcctcagaacatcacttcactttcttccttgtattctgcccagttgcccccatggtcggcctctggtcatagctcttcttcctccccatgatccttttttgtttctttgtttttattgagtctatattttcccgtcttttataaaaaaaaaaaaaa

SEQ ID NO: 309 - protein, 281 aa, Glycine max
MMNNPALLSRLFPGINREREMSAMVSALTHVVSGEVPTGDSSSVLHHQPHDDDAVTVKPNMPSTTPFSSTYVVATSSLKRSRQHDTYTPSFSHPPSSFPAMPTSAECSKSGMGNAVYEYRTRGTENVKKEEGRRKYRGVRQRPWGKWAAEIRDPFKAARVWLGTFETAEAAARAYDEAALRFRGSKAKLNFPENVTLRQPQFTVSTSTDPFQLSGTNLYDHRMFLTSNTMASHHLQSSLPLPPATSSSLTSPPQNITSLSSLYSAQLPPWSASGHSSSSSP

SEQ ID NO: 310 - DNA, 1556 bp, Zea mays
  CDS (219)..(1532)
tttcgtcctccccaactccgcctcccaactcccaagtcccacccccactccctcgctcaccagaggaactagcggccaggcaaagccgagccgcaaccgcgaagatcttgcgtggcctccttttcccagctcgtcactgtgccgctcgtgtccttcactcccggtccgcccaaccaataatccatcgatccatccaccaccaccaccccgctgcggcgatgtgcggcggcgccatcctctcgggtttcatcccgccgtccggggtggcggcggcggcggcggcggcggccaagaagaagcagcagcagcggtgccgtgtgactgcggacctgctatggccggggcccggcagtaagggagctccccaggacaaggaggaggacttcgaggccgacttccgcgagttcgagcgcggcctcggcgaggatgacgtggacagcgccggcgaaggcggcgaccccgaggtccaggagcttcctccgccggagccgacgaggtttgccttcgccaccgcggccaaggcagcagttgatggcgtgatgacgacgactccaaaggatgtgcaaggagatagagcagtaaaaaagcgcggccggaagaaccagtacaggggaatcaggcagcgcccttggggcaaatgggcagctgagatcagggaccccaacaagggcgtccgcgtctggctcggaacctacaacaccgccgaggaggcagctagggcatacgacgccgaagctcgcaagatccgcgggaagaaagcgaaggtgaatttccccgatgacgacgcgacaggcactcgtcacaggccaacgaacgccgcgaacgcagcgaggctagtagctccacccccacccccgaaggcctgcgccgatgagatgtttaacaacctgaagaacgacgacggcgacaacaacaacaacgatgatctgtttgcgatgtttgcgttcggtgacaataagaaggaggccgttcctgcagcgaagccagccgccgccgagggtggcagtggcagtggcagtggcagcttcctcgtccctgcgcctgcgatggcggcggcggtgcccggtaataagaggaggtcgtccgcgaccaacattatggtctccgtctccgacgaccagagcagcaactcctacggctccggctcctccgacttggtggggtcgtggtcgtgggacgacgccgccgccgccgccgccatgacctcggactacacctcctcggtcttcgctccggcgtcttactcttacatgcaaggcggagcgccgaagagaatgaggagcagctacggcggcgcgccgcccagcctcgcacatgacgcggccatgcctggctttggccttgataaagtgagctaccaccactaccaggcgttgcctccttattacgtcgggagcagcaacgcgtcggtgggcaacctcggtcttctgcagcaggctgatgatgctccagctccacaggatggggcgagcgccggggatatctggagcctcgacgagctgctcatgctggcagcagctggtgcttattgagaaccgaaaaaaaaaaaaaaaaaa

SEQ ID NO: 311 - protein, 437 aa, Zea mays
MCGGAILSGFIPPSGVAAAAAAAAKKKQQQRCRVTADLLWPGPGSKGAPQDKEEDFEADFREFERGLGEDDVDSAGEGGDPEVQELPPPEPTRFAFATAAKAAVDGVMTTTPKDVQGDRAVKKRGRKNQYRGIRQRPWGKWAAEIRDPNKGVRVWLGTYNTAEEAARAYDAEARKIRGKKAKVNFPDDDATGTRHRPTNAANAARLVAPPPPPKACADEMFNNLKNDDGDNNNNDDLFAMFAFGDNKKEAVPAAKPAAAEGGSGSGSGSFLVPAPAMAAAVPGNKRRSSATNIMVSVSDDQSSNSYGSGSSDLVGSWSWDDAAAAAAMTSDYTSSVFAPASYSYMQGGAPKRMRSSYGGAPPSLAHDAAMPGFGLDKVSYHHYQALPPYYVGSSNASVGNLGLLQQADDAPAPQDGASAGDIWSLDELLMLAAAGAY

SEQ ID NO: 312 - DNA, 1579 bp, Glycine max
  CDS (146)..(1324)
aaccctgaagaaagacacagccattgtttgtttactttccattgattgagcgaaagctttgttttttctgcgatcattttccattgggtggaagaaagtctcaacctttagtcgaaagagcaaggatctgagtgagtgagcgatcatgtgtggtggtgcgattatctccgacttcattccagcgggtcccgccggcggggcgcagcgcgtgaccaccgacatcctgtggccgaatttgaggaagcggttctcgaagtcgctgctggacgatgatttcgaggcagggttcagagaattcgaggatgactcggaaatcgaggatgtcgatgatgaggacgatgaagaggaggaggagttgaagaagaagaagccctttgggttctctcgctccaacaacaaggctgcttctaagcctctctctcgtggagcaacaactgtgaaatctgtggaatcaaaggggcaagctgagaagtgtgccaagagaaagaggaagaaccagtatcgcggaatccgccagcgtccatggggaaagtgggctgctgagattcgcgacccaagaaagggggttcgtgtttggcttggaactttcagcactgctgaagaagctgcaagagcttacgatgctgaagcaaggaggatccgtggcaagaaagccaaggtgaatttccctgatgagccttcaggcgctgcttcctcaaaacgtctcaaggcgaatccagaggctcagccaatgaagaaaaatctgaactctgtgaagccgaaaataaaccagatgttcaattttggtgacaatcttgagggctactacagccctatagatcaggtggaacagaaaccactggttaaccagtatgttaaccgtgccccgtttgctggaaatggagttcaagtctcacctgttactccatctgctgatgttactgcttacttcagctctgagcattcgagcagctcgtttgattattctgacctcggatggggtgaacaagtccccaagacacccgagatctcatccatgctttctgctgctcctttggacggtgaatctcagtttgtgcagggtgctgctgatcagaatcagaagaagaacaacctgctggatatggcatctgtgcaagatgattctgcaaaaactctttctgaggagcttgcagacattgaatcccagctgaagttctttgagaccccttcttttcttgatgaagcctgggctgatgctgcattggcgtctttgctcagtgaagatgcatctcaggatgctgctggaaaccctatgaacctttggagcttcgacgacctgccttccatggcaggagtcttctgaacaccttcatatccctttttatgtaaataaagctacaagaattgtgatcgtgatgttggtgatggaatccacagcaagaaaaccaacctgcttaaagcatatgtggagtttatttatcttgtagctaatgcagtataggactatatataggtttttatagggtatcctttgtgtgaaactcaagagacctcgttttcaggggattttctgtttgatgtccataaggattatcaattatgataaaaaaaaaaaaaa

SEQ ID NO: 313 - protein, 392 aa, Glycine max
MCGGAIISDFIPAGPAGGAQRVTTDILWPNLRKRFSKSLLDDDFEAGFREFEDDSEIEDVDDEDDEEEEELKKKKPFGFSRSNNKAASKPLSRGATTVKSVESKGQAEKCAKRKRKNQYRGIRQRPWGKWAAEIRDPRKGVRVWLGTFSTAEEAARAYDAEARRIRGKKAKVNFPDEPSGAASSKRLKANPEAQPMKKNLNSVKPKINQMFNFGDNLEGYYSPIDQVEQKPLVNQYVNRAPFAGNGVQVSPVTPSADVTAYFSSEHSSSSFDYSDLGWGEQVPKTPEISSMLSAAPLDGESQFVQGAADQNQKKNNLLDMASVQDDSAKTLSEELADIESQLKFFETPSFLDEAWADAALASLLSEDASQDAAGNPMNLWSFDDLPSMAGVF

SEQ ID NO: 314 - DNA, 1657 bp, Glycine max
  CDS (146)..(1294)
aaaaccctgaagaaagacacagccattgtttacttttcattgattgagccaaagctttgtattttctgcgataattttccattgggtggaagaaagtctcaacctttattcgaaagagcaaggatctgagttgagttgagtgatcatgtgtggtggtgcgattatctccgacttcataccggcaggtcccgccagcggggcgcggcgcgtgaccgccgacatcctgtggccgagtttgaggaagcgcttctcgaagccgctgctggacgatgatttcgaggctgggttcagagaattcaaggatgattcggaaatcgaggatgttgatgacgaggacgatgaagacgaggaggagttgaagaagaagccctttgggttctctcgctccagcaacaaggctgcttctaagcctctctctcgtggatcagcaactgtggaatcaaaggggcaagctgagaagtgtgccaagagaaagaggaagaaccagtatcgtggaatccgtcagcgtccatggggaaagtgggctgctgagatccgtgacccaagaaagggggttcgtgtttggcttggaactttcagcactgctgaagaagctgcaagagcttatgatgctgaagcaaggaggatccggggcaagaaagccaaggtgaatttcccggatgagccttcaggcgctgctgcttcctcaaaacgcctcaaggtgaatccagaggctcagccaatgaaggaaaatctgaacaccgtgaagccgaaaatgaaccagatgttcaattttggtcacaatctggagggctactacagcccaatagatcaggtggaacagaaaccactggttaaccagtatgttaaccctgccccgttccctggaaacggagttcaagtctcacctgttactccatctgctgatgttactgcttacttcagctctgagcattcgagcaactcgtttgattattctgaccttggatggggtgaacaagtccccaagacccccgagatctcatccttgctttctgctgctcctttggagggtgctgctgatcaggttcagaagaccaacaactcgcaggatgtggtggctgcacaagatgattctgcaaaaaccctttccgaagagcttgcagacattgaatcccagctcaagttctttgagaccccttcttttcttgatgaagcctgggctgatgctacattggcgtctttgctcggcggagacgcaactcatgacgccgccggaaaccctatgaacctttggagcttcgacgacctgccttccatggcaggagtcttctgaacaccctttatctccccttttatgtaaataaagctacaagaattgtgatcgtgatgttggtgatggagtccacagcaagaaacctgcttaaagcttatgtggagtttattttatcttgtagctaatgcagtagtataggactatatataggtttttattatagggtatccttttgtgaactcaaagacctcgttttcaggggattttctgtttgatgtccttaaggattatcaattatgttatatatggtcttggatacagtcttgactgctgatacagtttttttttaacttggttgttttcattttcattattattattatggcaatttgattatgattttgagaccaaaaaaaaaaaaaa

SEQ ID NO: 315 - protein, 382 aa, Glycine max
MCGGAIISDFIPAGPASGARRVTADILWPSLRKRFSKPLLDDDFEAGFREFKDDSEIEDVDDEDDEDEEELKKKPFGFSRSSNKAASKPLSRGSATVESKGQAEKCAKRKRKNQYRGIRQRPWGKWAAEIRDPRKGVRVWLGTFSTAEEAARAYDAEARRIRGKKAKVNFPDEPSGAAASSKRLKVNPEAQPMKENLNTVKPKMNQMFNFGHNLEGYYSPIDQVEQKPLVNQYVNPAPFPGNGVQVSPVTPSADVTAYFSSEHSSNSFDYSDLGWGEQVPKTPEISSLLSAAPLEGAADQVQKTNNSQDVVAAQDDSAKTLSEELADIESQLKFFETPSFLDEAWADATLASLLGGDATHDAAGNPMNLWSFDDLPSMAGVF

SEQ ID NO: 316 - DNA, 1028 bp, Zea mays
  CDS (177)..(854)
tcgctgtcgacgatttcgtccaaatccaacgtccgcagaaaccaaactcccgtcgaggaggaggcgtcgacttcccatagtttccactccacttcgatcctatcgtatccttcccaaacactccaccaagaaccttttccccctccaataatagtccaagttactcggaggaatccatgtgcggcggtgcaatcatcttcgactacatcccggcgcggcgccgggtgtccgccgctgacttctggcctgactccgaagccgacgccgaggactccgactcgcacgcccctgaccctgagagagcgccgcgcccgcgcgggaaggcgaagcgtgggcgcaagaaccagtaccgcggcatccggcagcggccgtggggcaagtgggcggcggagatccgcgaccccgtgaagggcgtgcgcgtctggctcggcacctaccccaccgccgaggccgccgcgcgcgcgtacgaccgcgctgccaggcgcatcaggggcgccaaagccaaggtcaacttccccaacgacgcctcctcctccagcgtcaccgcgccgacggcggcatctggggtggcggcacaggccccggccgtttttctcccggcgcccaaggtagaggcgcgcgcacaggtgtccgacgaggtcaaggagctgtccgaggagctaatggcctacgagaactacatgagcttcctcggcgtcccgtacatggagggcgggaatgcagctgcaagtgccaccaccgctgccgctgccgccgtccccgaagaagcgcaggtgccggtgccggcgccagccgggctgtggagcttcgaggactactactacccgccgtcactgtcgctcttcactgaataatgaacgcggtttgccgtgtctgtgttgttatctcttttgtatctgtggctcgcgagttgaggcatgtaaacaagctttgcagttttttttttaactccggtctgtcagtctgtgcttctcagcagctcgctgcagtgcagaagaatctgtttcatgcaaaaaaaaaaaaaaaaa

SEQ ID NO: 317 - protein, 225 aa, Zea mays
MCGGAIIFDYIPARRRVSAADFWPDSEADAEDSDSHAPDPERAPRPRGKAKRGRKNQYRGIRQRPWGKWAAEIRDPVKGVRVWLGTYPTAEAAARAYDRAARRIRGAKAKVNFPNDASSSSVTAPTAASGVAAQAPAVFLPAPKVEARAQVSDEVKELSEELMAYENYMSFLGVPYMEGGNAAASATTAAAAAVPEEAQVPVPAPAGLWSFEDYYYPPSLSLFTE

SEQ ID NO: 318 - DNA, 1552 bp, Lycopersicon esculentum
  CDS (34)..(1017)
gacaattatacattttccgtcaaaacataaatcatgtgtggtggttctataatctccgattacatagaccctagccggacttctcgccggctcaccgccgagtttctatggggtcgtttcgatctcggtaagaagcaaaaaaatcccaacaattatcactctaaagctaagcatttgcgatctgaagttgttgacgactttgaagccgattttcaggacttcaaagagttatccgatgatgaggatgttcaagtcgatgtcaagccatttgccttctctgcttccaaacactctactggttccaaatctttgaaaactgttgattcagacaaggatgctgctgctgataaatcctctaagagaaagaggaagaatcaatatagagggatcagacagagaccttggggtaagtgggcagctgaaatacgtgacccaaggaaaggggttcgggtctggctgggaaccttcaatactgcagaagaagctgccaaagcttatgatattgaggcgaggaggatcagaggcaagaaggctaaggtaaactttcctgatgaagctcccgcccctgcatcaagacacactgttaaggtgaatcctcagaaggtccttcctgaggagagcctgtattcacttcagtccgactcagcaatcatgaacagcgtggaggatgaccattatgattcttttggattttttgaagagaaacccatgacaaaacagtatggatatgagaatgggagcagtgcttctgcagatacgggatttggttcgttcgtcccttcagctggcggtgatatctacttcaactctgatgtaggaagcaactcttttgaatgctctgattttggttggggagagccatgctccaggactccagagatatcatctgttctgtcagctgctattgaatgtaatgaagctcaatttgttgaagatgccaattctcagaaaaagttgaaatcatgcaccaacaaccccgtagctgatgatggaaacccccgttactatggtacctgaagagcttccagcttttgaacctcagatgaatttctttcatctcccatatatggagggaaattgggatgcatcaggtggtaacttcctcaacacaagtgcaactcaaaatggtggtgaaaatgctatggacctgtggtcctttgatgatgttccttctttaatgggaggtatcttttaagtcaacatgccttgagttttgtaaataaggcttcatgtgagtgattttttgctgttgtataatgtacttagtgcaaatatttgatatgttaatttgatctccgttaacttgttcttttaggtgtgtctggtggtggaagaagaatgatccacagagaaccatgattaagccatggataatgcactaagtagagcagtgcataggtaattaggtttaattaactactagtagagatgttaaattcgagttttacttaaaaacaattgggctgtatggattatgagaattgatgagacctcgatgcttgctataacgttacctttttagtgttgctttcacaaaaaaaaaaaaaaaaaa

SEQ ID NO: 319 - protein, 327 aa, Lycopersicon esculentum
MCGGSIISDYIDPSRTSRRLTAEFLWGRFDLGKKQKNPNNYHSKAKHLRSEVVDDFEADFQDFKELSDDEDVQVDVKPFAFSASKHSTGSKSLKTVDSDKDAAADKSSKRKRKNQYRGIRQRPWGKWAAEIRDPRKGVRVWLGTFNTAEEAAKAYDIEARRIRGKKAKVNFPDEAPAPASRHTVKVNPQKVLPEESLYSLQSDSAIMNSVEDDHYDSFGFFEEKPMTKQYGYENGSSASADTGFGSFVPSAGGDIYFNSDVGSNSFECSDFGWGEPCSRTPEISSVLSAAIECNEAQFVEDANSQKKLKSCTNNPVADDGNPRYYGT

SEQ ID NO: 320 - DNA, 1259 bp, Coffea canephora
  CDS (36)..(1025)
aagtaccgcaaatttgtaagcttagatcatcaaaaatgtgtggcggtgcaatcctcgaaggcctcatcccgccccgcaacaacaacgacggcactcgccgtctctcctccgctgacctctggccctccgctgctgatttttggcccaactctcaccttgccaagcccagccgctccaacccaactgatgccccccacaaagccacgcacgaaacttgtcacgatccacatgatgaagctggtggaaagcagcaagtccttcccaagggtgccaagaggcagaggaaaaacttatacagggggatcaggcagcgaccatgggggaaatgggctgctgagattcgagaccctaggaaaggcgtgagagtctggttgggcactttcaacactgccgaagaagctgccagagcctacgacaaagaagctcgaaaaatcagaggcaagaaagccaaggttaacttcccaaacgaggattcgaccagttatcccacatgcatcccttcgcaaacccagtaccaacaggtacacatccccagccctcccactttctgtggtccctcctcctccaattgcaagttcaatcagctccgtgttgggtcgtctgattgcagtgccagtgactgctatcacgcgaacagcatcgatgattgtgcccgtttcaccaatatgatgggttttcgaaatccaagcgaagaggtttctggttctggtagttcggataatgagtgttttcttggccaccttaaacaagtagccaaggcggcggcggaggaggaggcggcttcggttataactgaaaatgatacgaaagacaataacaaagcagctgaaagcgaggagtaccaagtggaaaagctgtctgaggagctgctggcctatgagtccttcatgaagttctatcagattccttatatagatgggcagtccgcagctgcatcggccaaccctgctcaagagctggcaacttctattcagctttggagctttgatgatgtctcacccgccaatcgcccaatgcctctgtaaccgccaatcgcccaagttcgatggtcttttttttgggagtcccaattgcgttttggtgcctagtttttgtaggttttgctatgtaattgacattaacttcttaaaacattgtaggaaattgttgttaggttgcaggttggtactcttgaccggcttgtttagttaaaatacctatatgtaggttggcactttgtaattactgtttttgtggacaaaaaaaaaaaaaaaaaaaaa

SEQ ID NO: 321 - protein, 329 aa, Coffea canephora
MCGGAILEGLIPPRNNNDGTRRLSSADLWPSAADFWPNSHLAKPSRSNPTDAPHKATHETCHDPHDEAGGKQQVLPKGAKRQRKNLYRGIRQRPWGKWAAEIRDPRKGVRVWLGTFNTAEEAARAYDKEARKIRGKKAKVNFPNEDSTSYPTCIPSQTQYQQVHIPSPPTFCGPSSSNCKFNQLRVGSSDCSASDCYHANSIDDCARFTNMMGFRNPSEEVSGSGSSDNECFLGHLKQVAKAAAEEEAASVITENDTKDNNKAAESEEYQVEKLSEELLAYESFMKFYQIPYIDGQSAAASANPAQELATSIQLWSFDDVSPANRPMPL

SEQ ID NO: 322 - DNA, 735 bp, Brassica napus
  CDS (81)..(626)
aaaacactttctttctctactccatctctctctctctagattctctcatttcttctctttaacctctgagattctcaacaatggcgtcgaccacttgcgctagggaggtgcactacagaggagtaaggaagagaccatggggtcgttacgccgcagagattagagatccttggaagaaaactagggtttggttaggcactttcgacactcccgaagaagctgctctcgcttacgacggcgccgcccgtttcctccgtggtatcaaagctaaaactaacttcccttctcctctctctcttgacctcaaccacatcccttctccctccgccgccgccgccgccccggataaccaccacaaccatcaactctggttctccgctcctcctcctcctcctcctcctcttcacatccccggaaattaccgccaccacggtctctatctccgaaccggagtgcttaacgggagaaccccctctacagaagcgccgctttacttcgccgcctcgcctgccgcagctacgtcgtcgcctcgagtgcttgagttattgagttcttctccttcctcccctacggcgagacgtggcttagccatcgatctcaacgagccgccgccactttggctgtaaaacagacgatggagacggagattaatggcgccgtttgcaacactttcgaccgaactattatggtttatttttttgtaactttagtttcttttagcacatatcttttttt

SEQ ID NO: 323 - protein, 181 aa, Brassica napus
MASTTCAREVHYRGVRKRPWGRYAAEIRDPWKKTRVWLGTFDTPEEAALAYDGAARFLRGIKAKTNFPSPLSLDLNHIPSPSAAAAAPDNHHNHQLWFSAPPPPPPPLHIPGNYRHHGLYLRTGVLNGRTPSTEAPLYFAASPAAATSSPRVLELLSSSPSSPTARRGLAIDLNEPPPLWL

SEQ ID NO: 324 - DNA, 1740 bp, Brassica napus
  CDS (442)..(1407)
ctgagagtaaaattcactacaaaaaaaactgagtgtcctccccaaaaaaatcattagatcattgcaattatttttctcatctgtttttcaccgcttcttcgatctctttttgttaatcatctgtttttcaaaaagaaaaatcggtttctgggtttatacacgtttgaatggttttaattgattattcatgcatacgaaaatccaagcttatgaaactgttttttttttaattgaaagccaggtattttcagaaagaaatcgttttttaaaaaatttcttctgaatttatctttttagtttccatagatttagtcgagggtaattttgtgttccctcaggatcatcaggttgcttatttcaaaccttttcgatccatttttattttctcgaattcttttcggattcaatttttatttttctttcgaaattttaaaatctacaatggaagctgctatgaatttgaacagtagcagaacgtttcaacaaccagattcgtttggtggtggtggcgaactcatggaagcgcttctaccttttatcaaaagcgtttccgactctccttccgcgtccgcgtctgcgtttattaatcccgcagcgtctgcgtttcctcttcccaccttccgcgattacaacccggaacactatctgacccaaccgtttccgtacgggtcggatcttcagcaaaccgggtcactaatcgggctcaacaacctctcctcttcccaaatccaccagatccaatctcagatccaccacaaccatcctctccctcccaccagatccaacctcaacctcagccccaagccgttactgatgaagcaacctggagtcgccggatcctgcttcgcctacggagctccgccgaagccggcgaagctgtacagaggcgtgaggcagcgtcactggggaaaatgggtggcggagatccgtttgccgaggaaccggactcgtctctggcttgggacgttcgacacggcggaggaagctgcgttggcctacgatacggcggcgtttaagctgcgcggcgatttcgcccggcttaacttccctaacctgcgtcacgacggatctcgcatcggaggcgagttcggcgagtataaacctcttcactccactgtcgacgccaagctcgaagctatttgtaagagtatggcggagacggagaaacaggagaagacgacgaaggcgtcgaagaaacgcgcatcgacggcggcagtcaaggcggaggagaattcgaattcgatcggtgagtctccaccgatgacggagctcgttgattccgccggatcttcgccgttgtcggagttgacgttcgccgacgcggaggagcagccgcagtggaacgagaccttcgcgttggagaagtatccgtcgtacgagatcgattgggattcgattctggcttgatcagttcgtgtgtaatttggtggaagactaggggtaaaatagtaatttgggggaagattaggggtataatagtaaatttagaagctgcctctgcaatggagttttttggaaattgcagagaggctactggggtaattaagattatgattagtgggtaaatttcatatgttaatatcgtgtatttgtgttaatctctgtgtcggtccagctgcggtttttttgtcatgctcgaccatgccacagagtgtttttttttgtttgggtttatgtaatttctagtttcattttctttatcttaatgtgatattttagtttattttgtagtaaaaaaaa

SEQ ID NO: 325 - protein, 321 aa, Brassica napus
MEAAMNLNSSRTFQQPDSFGGGGELMEALLPFIKSVSDSPSASASAFINPAASAFPLPTFRDYNPEHYLTQPFPYGSDLQQTGSLIGLNNLSSSQIHQIQSQIHHNHPLPPTRSNLNLSPKPLLMKQPGVAGSCFAYGAPPKPAKLYRGVRQRHWGKWVAEIRLPRNRTRLWLGTFDTAEEAALAYDTAAFKLRGDFARLNFPNLRHDGSRIGGEFGEYKPLHSTVDAKLEAICKSMAETEKQEKTTKASKKRASTAAVKAEENSNSIGESPPMTELVDSAGSSPLSELTFADAEEQPQWNETFALEKYPSYEIDWDSILA

SEQ ID NO: 326 - DNA, 970 bp, Brassica napus
  CDS (116)..(778)
aactacgaaacttctcagtctcacttccttcttctatataacctccccaaatctcaaatccaaaactccacaacacaatcaaaaccataaaccaacgactccaagtctctcatatatggcatcttcacaagaccaatcagctttggacctcatcactcaacacctccttaccgatttcccttccttagagactttcgtctctagcatccatcagagcaccacctccactcttagccaacgcaagccatctcttgccaccatttcagttcctactactgcaccggtggttcaagaggatgatcataggcattacaggggcgtgaggcgtaggccgtggggtaagtatgcggctgagatcagagacccaaacaagaaaggcgttcgtgtctggttaggtacttttgacacggccgtggaggctgcaagaggttacgacagggctgcttttaaactaagaggaagcaaagccattcttaacttcccactagaagcaggcaagcaccaggactctggagacaacaagaacaagaagactgtggctttgaaagctaagaggaagagaccagaaacagaggatgaaaaccatgagagaaacctgatcagtcataaagctgtgaaaagggaagagacggaagctcagggtgaggcttgtccgttaacaccatcaagttggatggggttttgggacgcagtagacggtatagggatgggactattctctgtgcctcctttatctccttacccatcgctaggacattctcaactcggagttaagtaagcttatggatgtaggtgacatccgcaactttggattatatatcatcggcaagcgaacacacaaacaagacaataattatcttaaggattgtattaaagattcctcacggagtgaattagtttgtagattggttgattgtaaatggtttgttatattcattcgttcttctcaatgcaattatctctactcttc

SEQ ID NO: 327 - protein, 220 aa, Brassica napus
MASSQDQSALDLITQHLLTDFPSLETFVSSIHQSTTSTLSQRKPSLATISVPTTAPVVQEDDHRHYRGVRRRPWGKYAAEIRDPNKKGVRVWLGTFDTAVEAARGYDRAAFKLRGSKAILNFPLEAGKHQDSGDNKNKKTVALKAKRKRPETEDENHERNLISHKAVKREETEAQGEACPLTPSSWMGFWDAVDGIGMGLFSVPPLSPYPSLGHSQLGVK

SEQ ID NO: 328 - DNA, 489 bp, Brassica napus
  CDS (1)..(489)
atgctacaacacggagccgccgctatggaggccggagtagcagcagctgacgtggccggcgtaaggaagagagaaagaccatacaaagggataaggatgagaaaatggggaaaatgggtggcggagattcgggagcccaacaaacgttcaaggctatggctcggctcttactctaccccagaggcggcggcgcgtgcatacgacacggcggttttctacctgagaggacctacagcaacgctcaattttccggagcttataccgagcatcgagaaatcctcagtcgaggacatgtcggcggcagcgatcaggagaaaggcaacggaggtcggagctgaagtagacgcgtacgggatggcggtgatgaacagcaaacgccgccgcgtttttggtcagaagggtgactatgttggcgggttattggagcgggttgacttgaacaagttaccgtacccggaaaatcaggataatgatgtggtgggaaaataa

SEQ ID NO: 329 - protein, 162 aa, Brassica napus
MLQHGAAAMEAGVAAADVAGVRKRERPYKGIRMRKWGKWVAEIREPNKRSRLWLGSYSTPEAAARAYDTAVFYLRGPTATLNFPELIPSIEKSSVEDMSAAAIRRKATEVGAEVDAYGMAVMNSKRRRVFGQKGDYVGGLLERVDLNKLPYPENQDNDVVGK

SEQ ID NO: 330 - DNA, 1330 bp, Brassica napus
  CDS (177)..(974)
gcggccgctgcgtgtcggttttttattattgatcttcttgtttttcttttaaaatagtttccgagggtattatttttatatccctcctttcggatctgcaaagaggttgtttatttcaaatctcttcgatctattattttcgatttcgattttccttttacataaaaaaatttataatggcaactactatggattactacaatagcaaaacgtttcaacaaaccgatcctttcggtggtgaattaatggaagcgcttttaccttttatcaaaagccctcccaccgattcacccgcgtctgcgttcgcgtttgcgtcttaccctgacgtctgcttgacccaaccgattccaaacgtgtcgtcggatctaaaccagacacactcgtactccaaccttctcagtcctaaaccggttcccatgaagcaaaccgcttctccacccaaaccgatgaagctatacagaggagtgagacagcgtcactggggaaaatgggtcgccgagatccgtctacccaggaaccgaacccgcctctggctcgggaccttcgacacggcggaggaagctgcgttggcctacgacaaggcggcgtataagctccgcggcgatttcgcccggcttaacttcccgaatctccgaggagagttcggcgagtaccagcctcttcagtcccccgtcgacgataagctcgaagctatctgtaagagcctggccgagacgcagaagccaacgaagaagtcttcttcccggaaacgttcatccaccgcgaaacaaccggaggaagtcaagacggaggattactctagcgttgtatctccgccgtcgacggagagctatggatcgccgttgtcggatttgacgttcgttgatgtggaggaggaggagcagccgtggaacgtgaacttcgcgttggagaagtatccgtcgtacgagatcgactggggactcgattctgtccacgtagatgatggtttgtaaattaggggatgccataggggtgttttaggaaactagaggtctctgcaatggagtttttggtcattgcattgagacacgttaggtggggtccttttgtgttattattaataagtgggtgtaccttaatgtaaattatttattacgtctctgcgtcggtggaagcttggatttttttgtcatgcttcacaccgtgcgagattttttttttaatgtactttgtagtttccccttgtcttaattccaagtgttttagcttccagttcagatacgtattgtgtaataaaaaaaagtgttgtgtaaaaaaaaaaaaaaaaaaaaaaaaaaaactagagcctcgtgccgaattcggcacgagg

SEQ ID NO: 331 - protein, 265 aa, Brassica napus
MATTMDYYNSKTFQQTDPFGGELMEALLPFIKSPPTDSPASAFAFASYPDVCLTQPIPNVSSDLNQTHSYSNLLSPKPVPMKQTASPPKPMKLYRGVRQRHWGKWVAEIRLPRNRTRLWLGTFDTAEEAALAYDKAAYKLRGDFARLNFPNLRGEFGEYQPLQSPVDDKLEAICKSLAETQKPTKKSSSRKRSSTAKQPEEVKTEDYSSVVSPPSTESYGSPLSDLTFVDVEEEEQPWNVNFALEKYPSYEIDWGLDSVHVDDGL

SEQ ID NO: 332 - DNA, 845 bp, Brassica napus
  CDS (119)..(805)
ggcacgaggatgctgtaagagagtttttttgtttttccaactgctacccttgttcctccatcttcatcttcttcagacagatctcttcgcaaccacattacttctggtttctccaaccatgaggaaagggagaggttcctccgccgttccacccgctcttccggtaaccgccaacggatccgtgaaggagccgaggtatagaggcgttaggaagagaccatggggccgattcgccgcagagatccgcgatccgttaaagaaatcccgagtctggctcggcacgttcgactccgccgtggaagctgcacgcgcctacgatcaagccgctcgtaacctccgtggtcccaaggccaaaaccaattttccgatcgactgctctccgtcttcccctctccaaccactctatcaccagaaccatcagaatcttcgatcggcgaatcagagccagatcgatccgttcatggaccatcggttatacggcggaggaggcgagcagcagattatcagccgcccggcgagtagcagcatgagcagcaccgtgaaatcgtttagcgggcagaggccgtcttcttccgtggcgaagccgttacccgcggcgaagaggtatccgcggactccaccggtggccccggaggattgccacagcgactgcgattcgtcgtcgtcggtgattgacgatggagacgacatcgtttcgtcgtctacgagaaggaaaccgccgtttcagtttgatcttaattttccgccgttggatggcgttgacttattcgatgatgatctccactgcaccgatctacgtctttgatttgtgggtattgagaaaaaaaaaaacatccgtgatttac

SEQ ID NO: 333 - protein, 228 aa, Brassica napus
MRKGRGSSAVPPALPVTANGSVKEPRYRGVRKRPWGRFAAEIRDPLKKSRVWLGTFDSAVEAARAYDQAARNLRGPKAKTNFPIDCSPSSPLQPLYHQNHQNLRSANQSQIDPFMDHRLYGGGGEQQIISRPASSSMSSTVKSFSGQRPSSSVAKPLPAAKRYPRTPPVAPEDCHSDCDSSSSVIDDGDDIVSSSTRRKPPFQFDLNFPPLDGVDLFDDDLHCTDLRL

SEQ ID NO: 334 - DNA, 810 bp, Brassica napus
  CDS (66)..(557)
cctcgtgccgaattcggcacgaggcacaaacacaccaacctcttgaatctctcctctctctctatatggcgccgacagttaaaacggcggtagttaacaccaacggcggagacggcggaatcaaagaaacccgttacagaggagtgagaaagaggccatggggtcgttacgccgccgagatcagagatccggtgaagaaggctcgagtctggctcggctcttttgacactgccaaagaagcggctcgtgcctacgacaaagccaatctcaattttcgcggcgcaaaagccaaaaccaattttccttatcctaacttcgtccacgacgagagtccgagccaaagcaggaccgtcgtatcatcgaagacgattagcgatctcaatcttgaaaccaggttccctttcccgaagattcaggtcaagtccgggatgttctttatcgagtcgtcaaggagcgaatcggaaggatcgtctgtggtgatggatcgtagtccagagagaccatcacgcctccccttggatttcgatctcaatttccctccaaagcctgagacctaattcttattaatgggatatgattatgaacatgcgattttataacttttagatgaattaaatgttctgaaatctaaatctaaagattgaagcttgtcgtatcttattcataaatgttagtgccaaaaatcttctttttttttttttccagcagagagttaaaaaagtagtatttgtgttctcatctgctgttgtttatcattaattgcatatcttttgtaatttctgatcaacataaataaaactttgttttggc

SEQ ID NO: 335 - protein, 163 aa, Brassica napus
MAPTVKTAVVNTNGGDGGIKETRYRGVRKRPWGRYAAEIRDPVKKARVWLGSFDTAKEAARAYDKANLNFRGAKAKTNFPYPNFVHDESPSQSRTVVSSKTISDLNLETRFPFPKIQVKSGMFFIESSRSESEGSSVVMDRSPERPSRLPLDFDLNFPPKPET

SEQ ID NO: 336 - DNA, 1602 bp, Brassica napus
  CDS (168)..(1259)
tggccacgcgtcgactagtacggggggggggcatcaaattatcaaaccacagcgagagagagagagagagaaaacaaaagagaaccccaaagaagctaatatttacagtttcgccgcaaagtttgtgtttctgaacatttaaccccctcgaatttgagttatacgccatgtgtggaggagctataatctccgatttcatccctccgccgagttcccgccgcgtcacgagcgagtttctctggccggatctgaagaagaacaaggggaaagcctcgaagaagcgatccgatttcttcgatctggacgacgagttcgaggctgattttcaagggtttgaggatgacgacgcgtcttttgactgcgaagacgatgatgatgatgtcttcgctaaagtgaagccctttgtcttcaccgcgaccaccaagcccgtagcttcccctcccaccgccactggttcagtgtctggcaagaagatcatagagtccggtggtcaagctgagaagtctgctaagagaaagagaaagaatcagtacagggggattaggcagcgaccttgggggaaatgggctgctgagatccgtgatcctagaaaaggctccagggaatggcttggaacattcgacaccgccgaggaagcagcaagagcctatgatgcagctgcacgcaggatccgtggtagtaaagctaaggtgaatttcccagaggagagcaacaacaaccgtagcgtctcccagaaacgaccttctgctaagaagctggtggctaaaccaaaccaaagcccagctttggttcagcagccaatgagtcagtactgcaacaactcctttggtgatgtgagtttcgtggaagagaagcctcagatgtacaacaatcagtttgggttagcaaactcgtacaacaaccactacttcagttctgatcaggggagtaactcatttgactgctctgagtttgggtggagcgaccacggccccaagacacctgagatctcttcgatgctagtcggtaataaccaagctccgttcactgaagaaaccaatgcagccaagaagctcaaacccagctctgatgacggaacaagcaaccagtctgatgatctgatggcataccttgacaatgccttgtgggaatctccatctccattagaagttgaagccatgcttggtgtagatgctgttgctgtgactcagggagaggagaacccgatggacctatggagcttagatgatatcaattacatgctggaaggagtcttctgaagtgagtgatggtttgcctaatttgtaaatagagctatgtgtgtgttggatttcgctgttgaagagggaacggtacaagtcacaacctggagcttattgcatcgtttttatcttatatatgagtctcttttaaattctctgaaataaatgggggtggtgattagtaaatagaggtataatctatctaatgagtcctcttccttcagttttttctttcttcttttctaagacagcttattaaatctattaagctctgtttttgatcttggtatcatcaccctcgcaagtgttttgttttgtcccatacttatttaacattatataatgaaaactatatggaagc

SEQ ID NO: 337 - protein, 363 aa, Brassica napus
MCGGAIISDFIPPPSSRRVTSEFLWPDLKKNKGKASKKRSDFFDLDDEFEADFQGFEDDDASFDCEDDDDDVFAKVKPFVFTATTKPVASPPTATGSVSGKKIIESGGQAEKSAKRKRKNQYRGIRQRPWGKWAAEIRDPRKGSREWLGTFDTAEEAARAYDAAARRIRGSKAKVNFPEESNNNRSVSQKRPSAKKLVAKPNQSPALVQQPMSQYCNNSFGDVSFVEEKPQMYNNQFGLANSYNNHYFSSDQGSNSFDCSEFGWSDHGPKTPEISSMLVGNNQAPFTEETNAAKKLKPSSDDGTSNQSDDLMAYLDNALWESPSPLEVEAMLGVDAVAVTQGEENPMDLWSLDDINYMLEGVF

SEQ ID NO: 338 - DNA, 1639 bp, Arabidopsis thaliana
  CDS (70)..(1194)
tttcgccccgaagattctatttctgatcatttacacccctaaaaagagtagagctttcgtgaagccaccatgtgtggaggagctataatctccgatttcatacctccgccgaggtccctccgcgtcactaacgagtttatctggccggatctgaaaaacaaagtgaaagcttcaaagaagagatcgaataagcgatccgatttcttcgatcttgacgatgatttcgaagctgatttccaagggtttaaggatgactcggcttttgactgcgaagacgatgatgatgtcttcgtcaatgttaagcctttcgtcttcaccgcaactactaagcccgtagcttccgctttcgtctccactgtaggttcagcatatgccaagaaaactgtagagtccgctgagcaagctgagaaatcttctaagaggaagaggaagaatcaataccgagggattaggcagcgtccttggggaaaatggcttgcggagatccgtgatccgagaaaaggctcccgagaatggcttggacattcacctgctgaggaagcagcaagagcttatgatgctgcagcacgcagaatccgtggcacgaaagctaaggtgaattttcccgaggagaagaaccctagcgtcgtatcccagaaacgtcctagtgctaagactaataatcttcagaaatcagtggctaaaccaaacaaaagcgtaactttggttcagcagccaacacatctgagtcagcagtactgcaacaactcctttgacaactcttttggtgatatgagtttcatggaagagaagcctcagatgtacaacaatcagtttgggttaacaaactcgttcgatgctggaggtaacaatggataccagtatttcagttccgatcagggcagtaactccttcgactgttctgagttcgggtggagtgatcacggccctaaaacacccgagatctcttcaatgcttgtcaataacaacgaagcatcatttgttgaagaaaccaatgcagccaagaagctcaaaccaaactctgatgagtcagacgatctgatggcataccttgacaacgccttgtgggacaccccactagaagtggaagccatgcttggcgcagatgctggtgctgtgactcaggaagaggaaaacccagtggagctatggagcttagatgagatcaatttcatgctggaaggagacttttgaagtgatcgatggttccttagtttgtaaataaagctgtgttggtgagttacagttacaagctcttcttgttgaatcgtaaagacaaacaacctaagtgttggtttcaggattaatcttctgtcgttcttttttggttgtttcaggattttgctgttgggggatggtacaagtcacacctcaagctctatgcattggtatctcatgagccttctcttccatagagagtttctcttttaattttgtcgaaataaaaaaggtgtgatgaagtaaatagaggtataataatatctatctattaagtcttgttttgttctttcatttttgtatttcttttctatttaaaagacagtttattagtcttctgagctctctttttgatctttgttatagcgtatcatcaccctcgaaagtgtaatgttttgtacccccaaacttgtttagcatt

SEQ ID NO: 339 - protein, 374 aa, Arabidopsis thaliana
MCGGAIISDFIPPPRSLRVTNEFIWPDLKNKVKASKKRSNKRSDFFDLDDDFEADFQGFKDDSAFDCEDDDDVFVNVKPFVFTATTKPVASAFVSTVGSAYAKKTVESAEQAEKSSKRKRKNQYRGIRQRPWGKWLAEIRDPRKGSREWLGHSPAEEAARAYDAAARRIRGTKAKVNFPEEKNPSVVSQKRPSAKTNNLQKSVAKPNKSVTLVQQPTHLSQQYCNNSFDNSFGDMSFMEEKPQMYNNQFGLTNSFDAGGNNGYQYFSSDQGSNSFDCSEFGWSDHGPKTPEISSMLVNNNEASFVEETNAAKKLKPNSDESDDLMAYLDNALWDTPLEVEAMLGADAGAVTQEEENPVELWSLDEINFMLEGDF

SEQ ID NO: 340 - DNA, 1289 bp, Lycopersicon esculentum
  CDS (1)..(1101)
atgtgtggtggtgcaattatctccgatttggtacctcctagccggatttctcgccggttaaccgctgattttctatggggtacatccgatctgaacaagaagaagaagaaccctagtaattaccactcaaagcccttgaggtctaagtttattgaccttgaagatgaatttgaagctgactttcagcacttcaaggataattctgatgatgatgatgatgtgaaggcatttggccccaaatccgtgagatctggtgattcaaactgcgaagctgacagatcctccaagagaaagaggaagaatcagtaccgggggatcagacagcgtccttggggtaagtgggcagctgaaatacgtgatccaaggaaaggtattcgagtctggcttggtactttcaattcagccgaagaggcagccagagcttatgatgctgaggcgcgaaggatcagaggcaagaaagctaaggtgaactttcctgatgaagctccagtgtctgtttcaagacgtgctattaagcaaaatccccaaaaggcacttcgtgaggaaaccctgaacacagttcagcccaacatgacttatattagtaacttggatggtggatctgatgattcgttcagttttttcgaagagaaaccagcaaccaagcagtacggcttcgagaatgtgtcttttactgctgtagatatgggactgggctcagtttccccttcagctggtacaaatgtttacttcagctctgatgaagcaagtaacacttttgactgctctgatttcggttgggctgaaccgtgtgcaaggactccagagatctcatctgttctgtcggaagttctggaaaccaatgagactcattttgatgatgattccagaccagagaaaaaactgaagtcctgttccagcacttcattgacagttgacggtaacactgtgaacacgctatctgaagagctatcggcttttgaatcccagataagttcttgcagatcccatatctcgagggaaattgggatgcatcggttgatgccttcctcaatacaagtgcaattcaggatggtggaaacgccatggacctttggtccttcgatgatgtaccttctttaatgggaggtgcctactaagctgcatacacatcttcccttgctaagttttgtaaataacgcttcatttgagtgaagtttgcgcctgcgtttacgtttatcaccaaactaaaagactatatatgtgttgtattaatttattcaaaatttactcgtttgatatatgtaagtatgtatccttgttttcataaa

SEQ ID NO: 341 - protein, 366 aa, Lycopersicon esculentum
MCGGAIISDLVPPSRISRRLTADFLWGTSDLNKKKKNPSNYHSKPLRSKFIDLEDEFEADFQHFKDNSDDDDDVKAFGPKSVRSGDSNCEADRSSKRKRKNQYRGIRQRPWGKWAAEIRDPRKGIRVWLGTFNSAEEAARAYDAEARRIRGKKAKVNFPDEAPVSVSRRAIKQNPQKALREETLNTVQPNMTYISNLDGGSDDSFSFFEEKPATKQYGFENVSFTAVDMGLGSVSPSAGTNVYFSSDEASNTFDCSDFGWAEPCARTPEISSVLSEVLETNETHFDDDSRPEKKLKSCSSTSLTVDGNTVNTLSEELSAFESQISSCRSHISREIGMHRLMPSSIQVQFRMVETPWTFGPSMMYLL

SEQ ID NO: 342 - DNA, 1605 bp, Fagus sylvatica
  CDS (95)..(1231)
caaacacactgaagaattaagtcatttgggaatcaggtttcttggaaaaacccctgccaaagccccttcaaggctctcagctttgagtccccagatgtgtggaggagctataatctccgactttatagcgccaaccgggtcgcggcggttgacggcggattatctctggggcgatcggaaaaaacccatttcaggaaagcgattctcgaagcctgtagtcgatttggacgacgaattcgagctcgattttcagggctttaaggacgaggaggagtctgatatcgacgaggaagaggtccttgtgcaagatgtcaagcccttcactttttctgctcctcctagctctggatctaagcctgtaaaatccgtggaattcaatgggcaagctgagaaatctgcaaagagaaagaggaagaatcagtatcgggggatccggcagcgcccatggggtaagtgggctgctgagattcgagacccaaggaaaggggtccgtgtctggcttggaacttttaacactgcagaaaaagctgcaagagcttatgatgcagaggcacggagaattcgtggcaagaaggctaaggtgaattttcccgatgagactccccgtgcttctccaaagcgttcagttaaggcaaatctgcagaagccacttgccaaggcaaacctgaactctgtccagcccaacctgaaccaaaatttcaattttatgaacaactctgatcaggactataccatgggtttgatggaagagaaacctttcacaaaccagtatgggtatatggattccatccctgccaatgcagatgttggactaaaaccctttgcttccaataatactaccccgtactttaactcagatcaggggagtaactcgtttgattgttctgactatggatggggagaacagggctctaagactccagaaatctcatctgttctttcagctactttagaaggggatgaatctcagtttgtggaggatgctatgcccacgaagaaattgaagtcagactctgggaatgcagtgttcattgaaaataacactgcaaagacactgtcagaggagctctcagcttttgagtcccagatgaactttcagatgccatttcttgagggaagctgggaatccaacatggaggcactgttcagtggggacacaactcaggatggtaactcgatggatctttggagcttcgatgacctccccgttatggctgggggagttctgtgaccgcaaaactattttccgcatgcttgctgttctagtttatgtataaataaggctaaatacatgttagaatggtttgtcattctgtggagatggacatgcctgtggtttcaaacaagctgaacactgaatgcttaagactctatgaagggatgtactgaagtagtgttgttctactgttgtatgagggagtacataggtccctatttaggatccctttgagagactaccttgaagacattgaattttgggattttgaatttgatgtttttgtattgatgattatgtgtgatgaaacctctgtcataaaaatactaaactaaaaacctgatgtatgtcaactgtgtttagtgtttgtttcaaaaaaaaaaaaaaaa

SEQ ID NO: 343 - protein, 378 aa, Fagus sylvatica
MCGGAIISDFIAPTGSRRLTADYLWGDRKKPISGKRFSKPVVDLDDEFELDFQGFKDEEESDIDEEEVLVQDVKPFTFSAPPSSGSKPVKSVEFNGQAEKSAKRKRKNQYRGIRQRPWGKWAAEIRDPRKGVRVWLGTFNTAEKAARAYDAEARRIRGKKAKVNFPDETPRASPKRSVKANLQKPLAKANLNSVQPNLNQNFNFMNNSDQDYTMGLMEEKPFTNQYGYMDSIPANADVGLKPFASNNTTPYFNSDQGSNSFDCSDYGWGEQGSKTPEISSVLSATLEGDESQFVEDAMPTKKLKSDSGNAVFIENNTAKTLSEELSAFESQMNFQMPFLEGSWESNMEALFSGDTTQDGNSMDLWSFDDLPVMAGGVL

SEQ ID NO: 344 - DNA, 1595 bp, Arabidopsis thaliana (mouse-ear cress)
  CDS (130)..(1206)
aaaacaacaaagcaaagcgttgaagagagaagaagaagcaaagatataacccccaaaagtatcaattagtttccattttcgccgctaagattctgttttcgaacatttacaccctcaagaatcgccgccatgtgtggaggagctataatatccgatttcattccaccgccgaggtctcgccgtgttactagcgagtttatttggccggatctgaagaagaatttgaaaggatcgaagaaaagctcgaagaatcgttcgaatttcttcgattttgacgctgagttcgaagctgatttccaaggtttcaaagatgattcgtctatcgattgcgatgatgatttcgacgtcggtgatgttttcgccgatgtgaaaccattcgttttcacttcgactccaaaacccgccgtctccgccgctgcggaaggttcagtttttggtaagaaagttactggcttggatggggacgctgagaaatctgcaaataggaagaggaagaatcagtaccgagggattaggcaacgtccttggggaaaatgggctgctgagatacgtgatccaagggaaggtgctagaatctggcttggaacgttcaagacagctgaggaagctgctagagcttacgatgctgcagcgcggagaatccgtggatctaaagctaaggtgaatttccctgaagaaaacatgaaggctaattctcagaaacgctctgtgaaggctaatcttcagaaaccagtggctaaacctaaccctaacccaagtccagctttggttcagaactcgaacatctcctttgaaaatatgtgtttcatggaggagaaacaccaagtgagcaacaacaacaacaaccagtttgggatgacaaactccgttgatgctggatgtaatgggtatcagtatttcagctctgaccagggtagtaattctttcgattgttcggagtttggttggagcgatcaagctccgataactcccgacatctcttctgcggttatcaacaacaacaactcagctctgttctttgaggaagccaatccagctaagaagctcaagtctatggatttcgagacaccttacaacaacactgaatgggacgcttcactggatttcctcaacgaagatgctgtaacgactcaggacaatggtgcaaaccctatggacctatggagtattgatgaaattcattccatgattggaggagtcttctgaagagatccagtttcatgtaaataaggctgcatgtttgtgagtttcccgcatcgttcgtttatcaacctccaaaactttctaatgtctgttacttgcatcttcttctgctgtctctgtctgtctctctcaggagttcctgtttgcattgcgagaagccatgagcctctatcttgagggtagttgtgatgaagttaagtagaggcttatttttaggggttgtggtagtttttgttttagtgaatcttttgaattcgtttgtgttttgtttttgttactttatgccccaaaactcctttaacatttgtcataatgtgtttgaacctctcatctgtttaatcaaataaatcttctttgtatgctactaagagtatgtgagaactgttgaacat

SEQ ID NO: 345 - protein, 358 aa, Arabidopsis thaliana (mouse-ear cress)
MCGGAIISDFIPPPRSRRVTSEFIWPDLKKNLKGSKKSSKNRSNFFDFDAEFEADFQGFKDDSSIDCDDDFDVGDVFADVKPFVFTSTPKPAVSAAAEGSVFGKKVTGLDGDAEKSANRKRKNQYRGIRQRPWGKWAAEIRDPREGARIWLGTFKTAEEAARAYDAAARRIRGSKAKVNFPEENMKANSQKRSVKANLQKPVAKPNPNPSPALVQNSNISFENMCFMEEKHQVSNNNNNQFGMTNSVDAGCNGYQYFSSDQGSNSFDCSEFGWSDQAPITPDISSAVINNNNSALFFEEANPAKKLKSMDFETPYNNTEWDASLDFLNEDAVTTQDNGANPMDLWSIDEIHSMIGGVF

SEQ ID NO: 346 - DNA, 1024 bp, Glycine max
  CDS (16)..(828)
ggttctagaacttccatgagctcacctctgaatggatctgcctcaacttgttcttgtgatttcccttcctcttctttactttctccacaccccaatttctacacacacactccccccccttcctacttactccaaagccaacaatccttaataggctttgagcaaccaccgagttcccttctcgggctcaaccacctaagcccgtctcagatttctcagatccaggcccagatcgaggcccaacagagccaaaaccagaacccacactctctcaactttctcggcccgaagcccgtcccaatgaagcacgtgggcgggcctccgaagcccacgaagctgtaccggggcgtaaggcagaggcattgggggaagtgggtggcggagatcaggctcccgaagaaccgaaccaggctctggctcggaaccttcgacacggcggaggaagctgctttggcttacgacaaagccgcgtataggctccgaggcgacttcgcgaggctgaacttcccgagcctgaaaggctcgtgccccggggaggagtacaagcctgtgcattccgcggtggacgctaagctcgacgcgatttgcgccaacttggcggaaatgcagaagcaagggaagacggagaaaggtgccaggtcagcgaagaaatcgaagcaaggtccgaaccaggaggccaagcccgaacctcaagcttccgctgaaagtgagggttctgcggattcttctccgctgtctgatcttacctttgatgtaaccgagccgcaatgggaacattttaatttgcagaagtttccttcttatgagatcgattgggattctctctgaacttcgtctttgtttttatgtctagtcttgtggctaataataataataatttaggttagtcttgctaggtggctgctgcaattgagtttttgaagattgcagtgcttcttgtaggatttcgatttttttttttttagcatttggttattggctatttggtcaatatgatgtaaatctctctaccttggtcagctgg

SEQ ID NO: 347 - protein, 270 aa, Glycine max
MSSPLNGSASTCSCDFPSSSLLSPHPNFYTHTPPPSYLLQSQQSLIGFEQPPSSLLGLNHLSPSQISQIQAQIEAQQSQNQNPHSLNFLGPKPVPMKHVGGPPKPTKLYRGVRQRHWGKWVAEIRLPKNRTRLWLGTFDTAEEAALAYDKAAYRLRGDFARLNFPSLKGSCPGEEYKPVHSAVDAKLDAICANLAEMQKQGKTEKGARSAKKSKQGPNQEAKPEPQASAESEGSADSSPLSDLTFDVTEPQWEHFNLQKFPSYEIDWDSL

SEQ ID NO: 348 - DNA, 801 bp, Glycine max
  CDS (1)..(801)
atgcaaagttcaatctcacaatctgagatttgcatcactgattaccttctaccccaagaagttccatctcaatttcaatttccagatatgagcaacaataacataccaatgaaccataccaaccttcaaatgcctcaaatcacatctttctccaagcctccaaggtcctcatcaaatctaagcaaccgcaaaccgtccttgagaaacatcacaatcccttccataacctcaggtcttacaacaactatgtcacaaacaacaacaacaacaacaatagctacaaccatgtataacaacaatcaagttacttcttcttcagatgaaaccaacaacatcaaagagaacaagcactatagaggggttagaagaaggccatggggcaagtatgctgcagaaatccgtgaccctaatagaaaaggctcaagggtgtggcttggaacctttgacacagccatagaagctgccaaggcttatgacaaagctgctttcaagatgagagggagcaaagccatattgaatttccctttggagattggagagtcagaggaatcagtctcaagctgcatcaaggttggtgtgaagagggaaagagaggaagagagtaaaagcaacaactatgagaaaagtgagtttaacaacaataataatagtaataagcatgtgaagaaagaagagtgttctcccaaagctgtttgccctttgactccatcatgttggaaaggcttttgggacactgatgttatgggaactatctttagtgtgcctcctttgtcaccactatctccactaatggttgtttga

SEQ ID NO: 349 - protein, 266 aa, Glycine max
MQSSISQSEICITDYLLPQEVPSQFQFPDMSNNNIPMNHTNLQMPQITSFSKPPRSSSNLSNRKPSLRNITIPSITSGLTTTMSQTTTTTTIATTMYNNNQVTSSSDETNNIKENKHYRGVRRRPWGKYAAEIRDPNRKGSRVWLGTFDTAIEAAKAYDKAAFKMRGSKAILNFPLEIGESEESVSSCIKVGVKREREEESKSNNYEKSEFNNNNNSNKHVKKEECSPKAVCPLTPSCWKGFWDTDVMGTIFSVPPLSPLSPLMVV

SEQ ID NO: 350 - DNA, 799 bp, Glycine max
  CDS (72)..(680)
ttacggccggggcacacacacattggtgtttccaccaaatacagtgagcaaagttagctgaaaattaaaacatggtttccgccaccgtggattccgattttgcattcttggaatctgttcaacaatacctacttggacatgattccatcaatctcatgtctgaaacccaccaagctgcatctcatgatccattttcagaccctaataaatgtgatggtgattcagggaacattgctttccgaagtgaggatgcaacggctgtggtagcgcgtgatcatgcgccaccaacatggaagcattacagaggggtgaggcgtagaccgtggggaaagtttgcggccgagattagggatccaaagaagaacggagctagggtttggcttggcacgtatgataccgaagagaaggccgctttggcatatgacaaagccgctttcaaaatgcgaggccaaaaggccaagctgaattttcctcatcttattgattccgacaattccgatgaattgtcggagccagtaatgatgacaacttccaagcgaagtttgttagaaatttcatcaccgtcgtcctcgtgttcagatgatagctcagaatcacaagggacaaagaggaggaagagcctggctgaactactgaataaattagccaagaatagaagccaagtcaaggtggaatgttgaagtggctagaggaatatgcatgttgtacaatttgatcaatcattaatatgagacttcaacgattgtaatgtaatctggtgttcatagaattaatgcaattttgttcaccataaaaaaaa

SEQ ID NO: 351 - protein, 202 aa, Glycine max
MVSATVDSDFAFLESVQQYLLGHDSINLMSETHQAASHDPFSDPNKCDGDSGNIAFRSEDATAVVARDHAPPTWKHYRGVRRRPWGKFAAEIRDPKKNGARVWLGTYDTEEKAALAYDKAAFKMRGQKAKLNFPHLIDSDNSDELSEPVMMTTSKRSLLEISSPSSSCSDDSSESQGTKRRKSLAELLNKLAKNRSQVKVEC

SEQ ID NO: 352 - DNA, 1555 bp, Glycine max
  CDS (113)..(1435)
ctcaaagggtgtcctgagaaggaatcacacaagagaaattttgggtggatcttggcaatttaaatttggtccaaaaatagtaagaaagaaaaccatagtttatatagttttcatgtccttgctaacggtggcgcaccaaagggggtcaggtgagtttatgcggttcacggaaagtcatggcggcggtggtggcggtgacggcgatggtgaatatggttatggacatgatgatggtagaggtggtgggggtggtggttcactagggttgaattttaaccaagtgatgcaacaaggtgaggttacaacgcaaggaggtactttggtttcagggtataacaggggtgatccagatttgagagaaatggtttccgctttgacacatgtggtggtgtcttcagggtcaggccagaggagcaccgaatggatccagcaaagtggttttcctatgatgtctgcatcttctctttcatgtttgtcttctttctcttctccttcttcttctggagcctcttgggttggccacaaaagaggcagagaagaagaagagagtagctcttcccataacatgatccaacaacaacaacaaagtgctccaagactcttcagaaacattggtgacttcatggtgccttctcaaggagactcatcttcagcgacagaagaagcccccacctccacaactacaagtgtaaccgctgtggcaacaacggttactgaaaccccacccccaccgggaggtggggaaaggaggagaaagtacaggggagtgaggcagaggccatggggaaaatgggcagcagaaattcgtgatccacacaaagcagcaagagtttggcttggaacattcgacacagaagaagcagcagcaagagcatatgatgaagctgcattgaggttcagaggcaacagagcaaagcttaacttccctgaaaatgtaagagcagttccacccattcaaccttttcaagccaccactaggctaaccgtttctgattccaccacctctcaattccggccactcgtcacggaggcgccgcccttcattcaacagccacagattcagggctcctctgacttgatcagagattacttgcaatactctcagcttctacagagtgattttcaacagcaacaaatacaacaacaatcaccttctagtttgcttcagcagttgtactataatgcacaattggcttcacttcaatcaccttcagtgctatcatcatctccttcattttcttcttccgtgtcaccaacaccattcccattgttctcaacctctgctcagttttcctctgcttctttccccatgttttcaagtcaacaaatgggctatttccagctgccggaaagctgccctcccgctggcggcgtgccagagtttccgccgtccacatggtcgggtaccagtggccagccaccaccttctggttgatacagtgtttcagtttccttcatattttccttttttctctttctttcatacttacgataaaaaaatgatttgttttactaaaaaaaaagagagagagagagaccgacacgcagcggccgc

SEQ ID NO: 353 - protein, 440 aa, Glycine max
MSLLTVAHQRGSGEFMRFTESHGGGGGGDGDGEYGYGHDDGRGGGGGGSLGLNFNQVMQQGEVTTQGGTLVSGYNRGDPDLREMVSALTHVVVSSGSGQRSTEWIQQSGFPMMSASSLSCLSSFSSPSSSGASWVGHKRGREEEESSSSHNMIQQQQQSAPRLFRNIGDFMVPSQGDSSSATEEAPTSTTTSVTAVATTVTETPPPPGGGERRRKYRGVRQRPWGKWAAEIRDPHKAARVWLGTFDTEEAAARAYDEAALRFRGNRAKLNFPENVRAVPPIQPFQATTRLTVSDSTTSQFRPLVTEAPPFIQQPQIQGSSDLIRDYLQYSQLLQSDFQQQQIQQQSPSSLLQQLYYNAQLASLQSPSVLSSSPSFSSSVSPTPFPLFSTSAQFSSASFPMFSSQQMGYFQLPESCPPAGGVPEFPPSTWSGTSGQPPPSG

SEQ ID NO: 354 - DNA, 1049 bp, Glycine max
  CDS (126)..(707)
aattcggcacgaggcctcgtgccgaattcggcacgacacacgcttcctactcctccctttcaccacttttctgctcccccttgagaaagaatttgaatcatcaaaattaaaaactcgcaccaacaatggccccaagagacagccgagccaccgcgttcgccggaccaggcccaggcccatcaccggcccacaaagagatccgctaccgaggcgtccggaaacgcccctggggccgctacgccgccgagatccgcgaccccggcaagaaaacgcgcgtctggctcggcaccttcgacacagccgaggaagccgctcgagcgtacgacaccgcagcgcgtgagtttcgcggtgccaaggccaagaccaattttccgacaccctcggaactcatccttaacaacaacattcgcagtcccagccagagcagcaccctcgactcttcctctcccccgtcaccgccaccgccgcttgaccttaccctaacccctctctccgtggccgtcaccgtcttcccggtggctcgtccggttctattctttgacgcgttcgcgcgtgcggacgccatgatcgccgtctcccgccgcgagatgtgtggctttgaacgccccgccgctgatttccgccgtaacgactccgattccgattacaaccgccgcgtgctccttgatcttgacctgaacgtgcctcctctcccggaggttgcctgattcatgcagggagatctggttttccgcaatttttttcgtactacttttttaagcatctgggaacactactacgcatttttttgtgacgaaattgccctcgagaaattatagtgttacggagagggagcagcagctaagtgtgagtagtggatgacatgatgctcggaattgttgttgaccattttgtgatgaagatataatcggcacgttatgtaaatacacgttataaccgaaaagcaaacgcgctttttcttgcttttttttgcaactgagaacttaacagagtatctcatggttgtttctgtaatttctcaaaatatataaatatttccatttccatcc

SEQ ID NO: 355 - protein, 193 aa, Glycine max
MAPRDSRATAFAGPGPGPSPAHKEIRYRGVRKRPWGRYAAEIRDPGKKTRVWLGTFDTAEEAARAYDTAAREFRGAKAKTNFPTPSELILNNNIRSPSQSSTLDSSSPPSPPPPLDLTLTPLSVAVTVFPVARPVLFFDAFARADAMIAVSRREMCGFERPAADFRRNDSDSDYNRRVLLDLDLNVPPLPEVA

SEQ ID NO: 356 - DNA, 1159 bp, Glycine max
  CDS (145)..(783)
ccaaacctaaacgaggaaaaaaaaaatatggaaaagaaacaagattaagaattggggtttgaagaagccggtggtgtctccttgcttgttctcgatcgatcttgttattgtaaaatataataacttttttatatcgtgatcaagatgcgccgagggagagccaccgccgccgtcgtggatccgacggcggagcaggcgaaggagacgcggttccgcggcgtcaggaagcggccgtgggggcgattcgcggcggagattcgagatccgtggaagaagcagcgcgtgtggctggggacgttcgattccgccgaggatgccgcgcgggcttacgacaaggctgcccgatccttccgcgggcccaaggccaagaccaatttcccctccttccccggcccgacggaccaccactcctcgcagcagattccgccgctctaccaggcccacgggctttccaccaagttcgagcccgcccaggtgaaccggcccaccaccagcggcatgagcagcaccgtggagtccttcagcgggcctagggttcccccctcctcctcctcctctcgcaagccccttgtggttgttaaccctatcatccctctcgacgacgacgacgacgactgccacagcgattgcgactcttcttcctccgtcgtcgacgaccaggactgcgtcctcacctcctccttccggcaaccgcttcccttcgatctaaacctcccgccgcccgatgccgcctacgacgacgacgacgacgacgacgtccccgccaccgcgctgtgcctctgatgaagaagagcctcttctcggtataatcataattttcttgttgttgttgttgttgttgttgttgactatctctggtttaattaattgaagttgttagattgtgttgtggtgttgtagagtaatattataatataggcatggagatggatggatggatggaaggttgtgttgttgtaagttatttggatccatagcattggacctcatctggaaaactgggtgctgcttctgctttcttcatggatctgcttcttacccttacccttaccccccaattagaacttactctctttttcttacttttctgtacaaaaattatggcaatcagatcatagaataaattacattctaatcaattactctttccctgcttgct

SEQ ID NO: 357 - protein, 212 aa, Glycine max
MRRGRATAAVVDPTAEQAKETRFRGVRKRPWGRFAAEIRDPWKKQRVWLGTFDSAEDAARAYDKAARSFRGPKAKTNFPSFPGPTDHHSSQQIPPLYQAHGLSTKFEPAQVNRPTTSGMSSTVESFSGPRVPPSSSSSRKPLVVVNPIIPLDDDDDDCHSDCDSSSSVVDDQDCVLTSSFRQPLPFDLNLPPPDAAYDDDDDDDVPATALCL

SEQ ID NO: 358 - DNA, 492 bp, Glycine max
  CDS (1)..(492)
atggcgtcttcttcagcctctcgtgagggacactacagaggagttaggaagcgaccatggggacgctacgctgcagaaataagagatccgtggaagaagacacgtgtctggctgggcacattcgatactcccgaggaagccgccctcgcctacgacggcgccgcccgctccctccgcggcgccaaggccaagaccaacttccctccggcgccgcctctctgcctcgacctcaacgtcccttcctccgatcaccgctggccccacgtcccccctcgcagcctcgtcctcagcgagttcctccacaccgccgttctcagagacattgaaccgccgcaactaccttttccacccgccgccgccatcgtcgctcaccgaagcccccacgccgggggagttcaggtggtggagagttctccaacggcgtcgtttttgggtctcgttaggcgcggcatccccatcgacttgaacgaacccccacccttgtggctatga

SEQ ID NO: 359 - protein, 163 aa, Glycine max
MASSSASREGHYRGVRKRPWGRYAAEIRDPWKKTRVWLGTFDTPEEAALAYDGAARSLRGAKAKTNFPPAPPLCLDLNVPSSDHRWPHVPPRSLVLSEFLHTAVLRDIEPPQLPFPPAAAIVAHRSPHAGGVQVVESSPTASFLGLVRRGIPIDLNEPPPLWL

SEQ ID NO: 360 - DNA, 1187 bp, Glycine max
  CDS (241)..(909)
aagaagaagaagagaaggtggtaccgccttcaattctctctctccatttctcatcctcatcatcttattatacctcttccatctccataacatccacttgtgaaaaaaacccattaatatatatcacacacacatgtatctctgagctccaatccaatccaagaccacaccttgtcgcgtcggacgaaccttggtgtctgtctttttttttttttttgtttcattagtttctccgaagagatgcggaagggcagaggaggaggagcctcggcggcggcggcggcggcggtgaacggatccgttttaaaggagcctcggtaccggggcgtgcggaagagaccgtgggggagattcgcggcggagatcagagacccgttgaagaaagccagggtttggttgggaaccttcgattctgccgaggatgctgcacgtgcctacgacaccgccgctcggaatctccgaggttccaaggccaaaaccaatttccctctctcacctttttgctatcaacaccccaccacggatcctttcttctacgctggtttccacgaccaccaaaacaacagcaacaacaacaacgacaaccttaacaaccctcaaagaccaacttcaagtggcatgagtagcaccgttgagtccttcagtgggccccgccctcccaccacaaccacaaccaccacgacgccgtttttgaccactacgcggagatacccgcgcactccccctcttgtccccgaagactgccacagtgactgcgactcttcctcctccgtcgttgacgacagcgacgacaacatcgtttcctcgtcgtttcgacctcccttgccgttcgatctcaacgcgctgccgtttgatgatgatgctgccgtcgtggatgatgatctacgctgcaccgcgctttgtctctgatgattatcgtgcgatgatgatttttaatttctcattttttttatctcttcaacttgattttttgttattgctatgagggaaaaaatatattaaaaaaatgatcagatgtaagattatggtaatatgatcttaattctgtcagaggcagattccgtgttgggtatattttcttctttttactatttattttttaaaacattttatttggaaggaaatattgaatgggaagagaaaaagagaaagaaattatgatctgttcgtttgaaaaaccaaatgaa

SEQ ID NO: 361 - protein, 222 aa, Glycine max
MRKGRGGGASAAAAAAVNGSVLKEPRYRGVRKRPWGRFAAEIRDPLKKARVWLGTFDSAEDAARAYDTAARNLRGSKAKTNFPLSPFCYQHPTTDPFFYAGFHDHQNNSNNNNDNLNNPQRPTSSGMSSTVESFSGPRPPTTTTTTTTPFLTTTRRYPRTPPLVPEDCHSDCDSSSSVVDDSDDNIVSSSFRPPLPFDLNALPFDDDAAVVDDDLRCTALCL

SEQ ID NO: 362 - DNA, 1171 bp, Glycine max
  CDS (23)..(847)
agaagaagaaacataccacgaaatgtacggacaaagtagctatgagtccgatttggcccttttggactccattcgccgccacttacttggcgactccgaggagcacaaattcggagccccgaatgttagttcgggtaacactccagcgtactctcggagctcctgtttcagcaggttgtacccttgcttgagtaacgattggggagaacttcctcttaaggaagacgattcagaagacatgcttctttacggtgttcttcgcgatgcaataaacgcagggtgggtcccatctctcgatgcatcctcaccggagagtttctcgtcgggtttcatcccggcggtgaccgtgaaatccgaaccggatctatttccggcgccagagcctgtctatattcctccggcggctcagaaggctgagccggcggtggttccggcgaaggggaagcactaccgcggcgttcggcagcggccgtgggggaaattcgcggcggagatccgcgacccggctaaaaacggggctcgggtttggctgggaacgttcgaaacggctgaggacgccgcgctggcttacgaccgagccgcgtaccgaatgcgcggctcgcgcgctttgttgaatttcccgctccggattaattcaggcgagcccgaaccggttcgggtcacggcaaagaggtattcgccggagccgtcgtcttcttcgtcggatagtgcgtcgtcgacgaagaggcggaagaaggtggtggggtccacggtgacggctcaaagtggattgagaaaggagcaagtgggaagtcaagtggcacacagtgcacacgtggagagcagttgttggtcaactaatgcgtgatgctgacgtgggatgcattgcggttttgctcttttttttttaaaaatacactttgtgtggcagtggctagaagttattataaaaattagaaataataacccaaaaaggggtggacagtgccacagtgtaaaaaatggatagggattctgactcattactcaagtgggggagtgataaaatctaaagaaaaaaaaaaaaaaagagaacagttggaaaaagttattagggtggaggttttgtttggatttgtgaatacaattacatgatttgttattttttggttcaatatttatgaaatttgtgaattgtgttgcatgaaaaaaa

SEQ ID NO: 363 - protein, 274 aa, Glycine max
MYGQSSYESDLALLDSIRRHLLGDSEEHKFGAPNVSSGNTPAYSRSSCFSRLYPCLSNDWGELPLKEDDSEDMLLYGVLRDAINAGWVPSLDASSPESFSSGFIPAVTVKSEPDLFPAPEPVYIPPAAQKAEPAVVPAKGKHYRGVRQRPWGKFAAEIRDPAKNGARVWLGTFETAEDAALAYDRAAYRMRGSRALLNFPLRINSGEPEPVRVTAKRYSPEPSSSSSDSASSTKRRKKVVGSTVTAQSGLRKEQVGSQVAHSAHVESSCWSTNA

SEQ ID NO: 364 - DNA, 1154 bp, Glycine max
  CDS (246)..(827)
tggccacgcgtcgactagtacggggggggggggcattgagtgggaaacacgcgcgtgaggagcgtaacattaaagacgcacgcccacggtgtggtttctctctctctccatagagggctataaaaccagtccaacacgcttgttccccctcagacattgtctcaatcccacacgcttcttactcctctcataacttttctgctccccgttgagaaagatttgaatccaaaggaaaaataacgctaatggctccaagagacagccgagccaccgcgctcattgggcccggcccaagcctatcaccggcccacaaagagatccgctacagaggcgtcaggaaacgcccctggggccgctacgccgccgagatccgcgatcccggcaagaaaacccgcgtctggctcggcactttcgacaccgccgaggaagccgcgcgcgcctacgacaccgccgcgcgtgagtttcgtggcgccaaggccaagaccaatttcccgacaccctcggaactcatccttaacaacaacaacataaacgctcgtagtcccagccagaccagcaccctcgactcatcctctcccccgccaccgccaccgctagaccttaccctcacccctctctcctccgctgtcttcccggtggcgcgtcctgttctattcttcgacgcattcgcgcgtgcggacaccatggtcgccgtctcgcgccgcgagacctgcggcttcgaacgccccgccgccgatttccgccgcggcgactccgactctgattataaccgccgcatactcctggatcttgacctgaacgtacctcctctcccggaggttgcctgattcatgcagggagttctgtttttttcgcaattattgtttttttggttttttaagcatctgggaggtactactacgcatcttttttgacgaaagtgccctcgagggagcagcaaagtgagtagtggatgacatgatgctcggatttgttgaccattttgtgatgatgaagatatataaccggcacgttatgtaaatacacgttataaccgaaagcaaacgtgcttttgcttggttgctttttttttttgcaactgaggactcttattcagagtatctcatggttgtttctgcaatttctcaaaatatataaatattccaatttccatc

SEQ ID NO: 365 - protein, 193 aa, Glycine max
MAPRDSRATALIGPGPSLSPAHKEIRYRGVRKRPWGRYAAEIRDPGKKTRVWLGTFDTAEEAARAYDTAAREFRGAKAKTNFPTPSELILNNNNINARSPSQTSTLDSSSPPPPPPLDLTLTPLSSAVFPVARPVLFFDAFARADTMVAVSRRETCGFERPAADFRRGDSDSDYNRRILLDLDLNVPPLPEVA

SEQ ID NO: 366 - DNA, 1038 bp, Glycine max
  CDS (115)..(732)
gtttttaatatatatacacccaacctcccccacacccccaacaccaccacgtaactgcgtgcactctctctctctctacaacaagaattcatctattcatttcagcccatcagcatggcgaaggagaagaaaaacttgtccaacaagaacaagaagccaagcaatgcagacgaggttcacttccgcggagtccggaagcgcccctggggccgctatgccgccgagatccgcgaccctggaaagaagacccgcgtctggctcggcaccttcgacaccgccgaggatgccgcccgcgcctacgacgtcgccgcccgaaacttccgtggccccaaagccaaaaccaacttccccttcctccccgacaacaacaccaacgttaacctcaacaagaagaacaacaacgttaacgttaaatctgacagtcccagccagagcagcaccgtggagtcctccaccccggagcgtgaattcacgcgccgcgccgcccccgccgcaatggatcgctttccgttcctacccatccagcagcaaatcctcgtgacccaccccgtcgcacccatgcgcccggtttactttctcgaccgggcccacttcatgacccagcccttcccactccgattcgaaccgggtccggtccagagcgactccgactcgtcctccgtcgtcgtcgattgccagcccaaaagagagctcaatctcgatcttaacttggctccacctaatgaatattaacctttttttttaatcttttaatttttcataaaaaagacagcagaaagaaaggaaaggactaaggagatttttttttctcttttttttttttttggaagattaatcttccattaaattgtcgtgtagattagataagatgttgttaattacatcctttgatgtaaataggttaatttttctgtttttttaggtccttgatagtattaacaaaggacatgatctgaaattgtctagatctggtataattttcatgtaacatcggaatatctgatgtaattctggctaatgttaattttctcttattac

SEQ ID NO: 367 - protein, 205 aa, Glycine max
MAKEKKNLSNKNKKPSNADEVHFRGVRKRPWGRYAAEIRDPGKKTRVWLGTFDTAEDAARAYDVAARNFRGPKAKTNFPFLPDNNTNVNLNKKNNNVNVKSDSPSQSSTVESSTPEREFTRRAAPAAMDRFPFLPIQQQILVTHPVAPMRPVYFLDRAHFMTQPFPLRFEPGPVQSDSDSSSVVVDCQPKRELNLDLNLAPPNEY

SEQ ID NO: 368 - DNA, 988 bp, Glycine max
  CDS (27)..(716)
tgaaaaggagagtagttggtactaggatgtggcttggttgccacgtcagcatgccccccttattttgcagctacaaaagggctctccctctctggtttttttcactcaccaaaaagacgaaagaagcaagcatgtgtggcggagcaatcatcgcagatttcatacctcggcagcgtccccgcaccctcacagcctccgaactctggcccaagcgcagcgaacctcaacctcaacctcctcctcctccagttaagaggcagaggaaaaacctctacagagggatcaggcagcggccctggggcaaatgggccgcggagattcgcgatccacgtaaaggagttcgtgtctggcttggcaccttcaacaccgccgaagaagccgccagagcctacgacaaagaagcccgaaaaatccgcggcaagaaagccaaagtcaatttccccaacgaggacgaccctctgccgcaatacggatcttgcaagagcctcaacttggagttcggttacgatctcaaccaaacagggcttttcccttcttctaacgctgatgagaattgcgggtcccacgtggcttactccgttacggaagccaacaacaaagtagagaagctttccgaggagcttatggcgtacgagaatttaatgaggttttatcagattccggaaaacgtcgttggggatttgtgggcctttcctgacacctctccacctctctgatttctgtcacatcgtttcttctatcattaattctccaattctgttcttaaaatatgatatgtacaatcagcaatttcaatttgcatgtatttaactttcagactctcaggagatgtttggttcggttgttttctgttttcattttcactgaaaataaaaaacggtgatgaaaatgtatttgattggatttctgaaaacattttcaggaaaaatgaaaacaggaaacaaccagaaaatgaaaacaagaaatcaatatatcataaattttcagt

SEQ ID NO: 369 - protein, 229 aa, Glycine max
MWLGCHVSMPPLFCSYKRALPLWFFSLTKKTKEASMCGGAIIADFIPRQRPRTLTASELWPKRSEPQPQPPPPPVKRQRKNLYRGIRQRPWGKWAAEIRDPRKGVRVWLGTFNTAEEAARAYDKEARKIRGKKAKVNFPNEDDPLPQYGSCKSLNLEFGYDLNQTGLFPSSNADENCGSHVAYSVTEANNKVEKLSEELMAYENLMRFYQIPENVVGDLWAFPDTSPPL

SEQ ID NO: 370 - DNA, 1720 bp, Glycine max
  CDS (427)..(1464)
caagtttgttcactccacacaaaagcaaccatatttttcagttttcacacctaaatcctttgacccatcatcactattaatctacaagctccatgttttgtttgcaatcccctgcgtctgcttgttggtatcatcagagctttgtgaaacataaagttaaagcagggcatattgcagagggagcaaaccgaatatttcaaaacttgttctactttttattatcactgttgcatttatttcagatatttagtatttgcctacaagtttgttctttagtttaaacacagacaagacgactctttatggcggctataaccaatttgaacttttcttccttgtgtaaaaaaaggttttgtgtgcgtttgtgcgtgttggagttggctttttgaagtgggtgcatgctgaagttatatgtgtatgtgaaagatgaagaacaatagagataaagaaaagggtaacgacgttgaccagagttacagacagcatcacacgttgtcaatgccaatgatgttttctggtttgaacagagagaaggagatgtcagccatgatctctgctttgacacatgtggtttgtggagaagatgagcatcatggtgctgattactctcttcttaatcacaatattaataatactaatagtgcagttgttggtgatgatgattttactgtaacatcaaatatggcttctggttctatgccaccttcttctacttgttcatctcaaggtggcaactctgttctcaagagaagacgggaatatgataatacaaatgatttctcacgtggaggttcattccctgctatttcaacaattgctgaaagttcaagcacggtaacaagaagaacggcgaatacagtatacgattacgaatacagaacagagaacgtgaaagtagtggaggaagaaccgaggagaaaatacagaggagtgagacagaggccatggggaaaatgggctgcggaaataagagaccctttcaaagctactagggtgtggttaggaacatttgaaaccgctgaggacgcagccagagcctacgatcaagcttcattgcgtttcagaggcaacaaagccaaactcaacttccctgaaaacgttagactcagacaacaacaagaacctccgttgaacttgaaccctccaccacctaatcatggggctattttgtcaattccttcaaccactgttcacactgaggctcttcagggttcacttggttcaagcaatttttatgagcattcttattcgcatcttcatgagtttcccgtgagtctctacgatcagattgcagagtcaacatctactactatggcttctcatcatcttcaatttttgccgccagcttcttcctcaactatgactatgacatctccgcaggcaccaccttcgatttatcctacgcatccagcggcatggtcttctggttatagttataatagctcttcttctgcttcggggtgatgtaaattgcgttttatttcaagtctctctcgtttttgccccttgtattgtatcattgttactctcctctgttttttgcatttgcaccacgaccatttccatccaggagtggttttttgtgaccatgttattatgatcaagcaaatcatataattcacagttaacagtttagtatctgtgtataatagagttttatttatcctcccatcacatttctccaaacaaccatatcaatcttatatctcttccttcttct

SEQ ID NO: 371 - protein, 345 aa, Glycine max
MKNNRDKEKGNDVDQSYRQHHTLSMPMMFSGLNREKEMSAMISALTHVVCGEDEHHGADYSLLNHNINNTNSAVVGDDDFTVTSNMASGSMPPSSTCSSQGGNSVLKRRREYDNTNDFSRGGSFPAISTIAESSSTVTRRTANTVYDYEYRTENVKVVEEEPRRKYRGVRQRPWGKWAAEIRDPFKATRVWLGTFETAEDAARAYDQASLRFRGNKAKLNFPENVRLRQQQEPPLNLNPPPPNHGAILSIPSTTVHTEALQGSLGSSNFYEHSYSHLHEFPVSLYDQIAESTSTTMASHHLQFLPPASSSTMTMTSPQAPPSIYPTHPAAWSSGYSYNSSSSASG

SEQ ID NO: 372 - DNA, 483 bp, Glycine max
  CDS (1)..(483)
atggaagaagcaggtttaggagattgttgttcctcgaattcgacgattacgaggaagagcgataagcgaaagcagcaacaccaacaacaagagaagccatacagaggaataaggatgaggaagtggggcaagtgggtggcggagattagagaacccaataagcgttcgaggatctggctgggttcttacgccacccccgtcgccgccgcacgcgcctatgacaccgccgtcttccacctccgaggcccttccgctcgcctcaacttccccgaattgctgtcccaggacgacgacgtttcgacccaacaacagggcaacatgtccgccgattcaattcgcaaaaaagccacccaagtcggcgccagagtcgacgcgctccaaaccgcgcttcagcaatcctcgtcctcacactccgctaattccagccacgtcagcagctctgacaaaccagacttgaacgagtatcccaaacctgaagattag

SEQ ID NO: 373 - protein, 160 aa, Glycine max
MEEAGLGDCCSSNSTITRKSDKRKQQHQQQEKPYRGIRMRKWGKWVAEIREPNKRSRIWLGSYATPVAAARAYDTAVFHLRGPSARLNFPELLSQDDDVSTQQQGNMSADSIRKKATQVGARVDALQTALQQSSSSHSANSSHVSSSDKPDLNEYPKPED

SEQ ID NO: 374 - DNA, 633 bp, Glycine max
  CDS (1)..(633)
atgggtaggggcggaaccgccgcggcggcggcggagatcgccgaacccggttcaaggccggtttttttcaaagaaccgcgttataggggcgtcagaaaaagaccgtggggccggttcgctgccgaaatcagagaccctttgaagaaagccagggtttggctcggaaccttcgacaccgccgaggaggcggcgcgtgcctatgacacggcggcgagaaccctccggggaccaaaggcgaagaccaatttccctctttctccgccgttctaccatcccgatccattttccgatcaccggcacttcgccaacaccggcgaagatttccacgatcaccggcgaccaacatccagtggcatgagcagcaccgtagagtccttcagcggcccacgcgctgccgtgccggcgacggcgccggtgattgccggccggagatatccccggacgccacccgttatccccgaggactgccgcagcgactgcgactcgtcgtcatccgttgtggacgacggagacggcgacaacgtggcgtcgtcgttccggcgagaaccgttgccgtttgatctaaacgtgttaccgttggacgatgctgacgtggcaaccgatgatctgttctgcaccgttctttgcctctga

SEQ ID NO: 375 - protein, 210 aa, Glycine max
MGRGGTAAAAAEIAEPGSRPVFFKEPRYRGVRKRPWGRFAAEIRDPLKKARVWLGTFDTAEEAARAYDTAARTLRGPKAKTNFPLSPPFYHPDPFSDHRHFANTGEDFHDHRRPTSSGMSSTVESFSGPRAAVPATAPVIAGRRYPRTPPVIPEDCRSDCDSSSSVVDDGDGDNVASSFRREPLPFDLNVLPLDDADVATDDLFCTVLCL

SEQ ID NO: 376 - DNA, 984 bp, Glycine max
  CDS (326)..(907)
ccacatcatagactgaacgacatgtgaatcgttttatgaaacactaattcaataatcatgacttgcaaattgcaatacagccaagttatagctgataggtaaagaaaaagaaagcaagacctcaaaatccccttgtgggaccccccatttgcttaaattgttgaaaattgtttagaaaaagtgccacacttagaactagcccaactacataaaccctccctctcctccctctcctcccccatttggtaccaccacaactctctatcactcacaacattttcacacaaacactttctgaaaaaagaattcgtttcttttccctaacatggccagatcacaacagcgataccgaggtgtccgacaaaggcattggggctcttgggtctccgaaattcgacaccccatattgaaaactaggatatggctaggaacttttgaaactgctgaggatgcagctagagcctatgatgaagcagcaaggctaatgtgtggcacaagagcaagaactaacttcccttacaaccccaatgcgtctcagtcatcatcttccaagcttctctcagcaactttaactgcaaaactgcataggtgctacatggcttctttgcaaatgacaaggccatcatcacaggcagagcctcagagagtggcttcaccaaatgtcatcacctcctccgcgagcaacttctccatgaagagtaacgaaactgagacattgttgttgccacaaaagagacaagaagaggagcaagaagcagaagggaattgggttttcaagaaggttaaggtggaaaatgctcagcagttcaagcctcttgaagaggaccacatcgagcaaatgatagaggagttgctgcattacgggtctattgagctatgctctgtgattccaccacaggctctttgaactcacattgagcaagcatttttattgttagttcacattcttactctgctaatttaatcaactaattctcttggacg

SEQ ID NO: 377 - protein, 193 aa, Glycine max
MARSQQRYRGVRQRHWGSWVSEIRHPILKTRIWLGTFETAEDAARAYDEAARLMCGTRARTNFPYNPNASQSSSSKLLSATLTAKLHRCYMASLQMTRPSSQAEPQRVASPNVITSSASNFSMKSNETETLLLPQKRQEEEQEAEGNWVFKKVKVENAQQFKPLEEDHIEQMIEELLHYGSIELCSVIPPQAL

SEQ ID NO: 378 - DNA, 1091 bp, Glycine max
  CDS (99)..(935)
tacggctgcgagaagacgacagaaggggaacacaatactcttcaaacactttaccttcttcttaagacaacaagctaaaagcgcttctaacttaagtgatggctaacgctgctgaagtttcagcgttgaaacgcatcaagttgcatcttttgggtgaactctctccactggccactccccaaaacaaatttgaccaaacaaaccctagcccctctgaatcttccaattccgaatcttcttctatttctcttaaccactacttcactgacctcctcgaacccgaaattgaatttcctctcttcgaattcgattccaaaccccaagtaatcgacctcgaaaccccgaaaaccctaatttcagctgagaagaagcctcaatttaatcggaaaccgtcgctgctaatcgctgttccgaagaagaccgagtggatccaattcggaaaccctgaggtggcggcgccggagaaccagcctgagaagaagcactacagaggtgtccgtcagcggccgtggggcaagttcgccgccgagatccgcgacccgaacaagcgcgggtctagggtttggctcggaaccttcgacaccgccatcgaagccgccaaggcctacgaccgagccgccttcaggctccgcggctccaaggccatcctcaacttccccctcgaagttaacaccgcggcggagaccgtctccgtcgccgccgtcgacgtcgagaggaagcgccgccgcgaggaggaggaggtggtggtggaggatgtaaaggcggtggtgaagaaggagaaaataacggagcatgatgtgagttgttttagggggatgccgttaacgccgtctatgtggaccgggttctgggacagtgacgtcaaggatattttcaacattccgccgttgtcgccgttatctccttttggattttcaccgctcgtggctgtgtgaaattccaatttaggactgcgttttttcgtgttttagtacttacagcgtcctcctgttcagggatgagcacattgtacatttgacgaatttgtttattcaacaatcttttattcacttttatttgctacataccatggagaatttttttgaagtttg

SEQ ID NO: 379 - protein, 278 aa, Glycine max
MANAAEVSALKRIKLHLLGELSPLATPQNKFDQTNPSPSESSNSESSSISLNHYFTDLLEPEIEFPLFEFDSKPQVIDLETPKTLISAEKKPQFNRKPSLLIAVPKKTEWIQFGNPEVAAPENQPEKKHYRGVRQRPWGKFAAEIRDPNKRGSRVWLGTFDTAIEAAKAYDRAAFRLRGSKAILNFPLEVNTAAETVSVAAVDVERKRRREEEEVVVEDVKAVVKKEKITEHDVSCFRGMPLTPSMWTGFWDSDVKDIFNIPPLSPLSPFGFSPLVAV

SEQ ID NO: 380 - DNA, 1433 bp, Oryza sativa
  CDS (104)..(1132)
agactacaagccattaaacagagacgaccaacgacttaaccacacttcttctttgtgctgtccaacctccattgttgggtgtgaaagctttggctcatctgccatgtgtggaggatccattctcggcgaccttcacttgccggtgcggcggacagtgaacgccggtgacctgtggggagacgccggcaagggtagagatggtggcgacggcttgaagaagaggaaggggagttcttgggatttcgatgttgattgcgatgatgatgatgatgatgactttgaggctgattttgaggagtttgaggatgactatggcgatgatgatgatgtgggtttcggggacgacgaccaagaatccgacatgaacggtctcaagctcgccggattcagcaccacgaagctcggcctcggcggcagcaggaagaggaagacgcgataccgagggatccggcagcggccatgggggaaatgggcggcggagatcagggacccccgcaagggcgtccgcgtctggctcggcacgttcggcaccgccgaggaggccgccatggcgtacgacgtcgaggcacgccgcatccgcggcaagaaagccaaggtcaacttccccgacgccgccgccgccgccccgaagcggccacggcgttcttcggcgaagcattcgccgcagcagcagaaggccaggtcgtcgtcgtcgtcgccggcgagcctgaacgccagcgacgccgtgtccaagtccaacaacaaccgcgtcagctcggctgggagcagcaccgacgccaccgccgccgccatcgccatcgacgacggcgtcaagctcgagctgctctcggagacggatccttctccgcccatggccgccgccgccgccgcgtggctcgacgcgttcgagctgaacgatcttgacggatcaagatgcaaggacaacgcattcgatcaccagattcacaaggtagaagcggctgtcgctgatgaattcgcgttctacgacgatccgagctacatgcagctgggttaccagctcgatcagggcaactcgtacgagaacatcgacgcgctcttcggcggcgaggccgtcaacattggtggactctggagcttcgacgacatgccaatggagttcagagcttattgagcatttgattctatttaggagggagtgaattatttgggaggaagaatcgatgttgtaacttgtaaaatctctgatgatgatctctgcatcatatgatcaatttgagtgcagttttgtttttgtaaatacgaattctttattatgatgttaggttcttaatttgcccttcttcatcagggatttgttcaggcttttgttgtgatgactgattggacgagggaaagattgcgttttttgttgtcatgttgggtactctactcttctgttcctaaagttgataagtgccaaaatttgtgagagg

SEQ ID NO: 381 - protein, 342 aa, Oryza sativa
MCGGSILGDLHLPVRRTVNAGDLWGDAGKGRDGGDGLKKRKGSSWDFDVDCDDDDDDDFEADFEEFEDDYGDDDDVGFGDDDQESDMNGLKLAGFSTTKLGLGGSRKRKTRYRGIRQRPWGKWAAEIRDPRKGVRVWLGTFGTAEEAAMAYDVEARRIRGKKAKVNFPDAAAAAPKRPRRSSAKHSPQQQKARSSSSSPASLNASDAVSKSNNNRVSSAGSSTDATAAAIAIDDGVKLELLSETDPSPPMAAAAAAWLDAFELNDLDGSRCKDNAFDHQIHKVEAAVADEFAFYDDPSYMQLGYQLDQGNSYENIDALFGGEAVNIGGLWSFDDMPMEFRAY

SEQ ID NO: 382 - DNA, 1539 bp, Glycine max
  CDS (104)..(1258)
attgagccaaagctttgtattttctgcgataattttccattgggtggaagaaagtctcaacctttattcgaaagagcaaggatctgagttgagttgagtgatcatgtgtggtggtgcgattatctccgacttcataccggcaggtcccgccagcggggcgcggcgcgtgaccgccgacatcctgtggccgagtttgaggaagcgcttctcgaagccgctgctggacgatgatttcgaggctgggttcagagaattcaaggatgattcggaaatcgaggatgttgatgacgaggacgatgaagacgaggaggagttgaagaagaagccctttgggttctctcgctccagcaacaaggctgcttctaagcctctctctcgtggagcaacaactgtgaaatctgtggaatcaaaggggcaagctgagaagtgtgccaagagaaagaggaagaaccagtatcgcggaatccgccagcgtccatggggaaagtgggctgctgagattcgcgacccaagaaagggggttcgtgtttggcttggaactttcagcactgctgaagaagctgcaagagcttacgatgctgaagcaaggaggatccgtggcaagaaagccaaggtgaatttccctgatgagccttcaggcgctgcttcctcaaaacgtctcaaggcgaatccagaggctcagccaatgaagaaaaatctgaactctgtgaagccgaaaataaaccagatgttcaattttggtgacaatcttgagggctactacagccctatagatcaggtggaacagaaaccactggttaaccagtatgttaaccgtgccccgtttgctggaaatggagttcaagtctcacctgttactccatctgctgatgttactgcttacttcagctctgagcattcgagcaactcgtttgattattctgaccttggatggggtgaacaagtccccaagacccccgagatctcatccttgctttctgctgctcctttggagggtgctgctgatcaggttcagaagaccaacaactcgcaggatgtggtggctgcacaagatgattctgcaaaaaccctttccgaagagcttgcagacattgaatcccagctcaagttctttgagaccccttcttttcttgatgaagcctgggctgatgctacattggcgtctttgctcggcggagacgcaactcatgacgccgccggaaaccctatgaacctttggagcttcgacgacctgccttccatggcaggagtcttctgaacaccctttatctccccttttatgtaaataaagctacaagaattgtgatcgtgatgttggtgatggagtccacagccaagaaacctgcttaaagcttatgtggagtttattttatcttgtagctaatgcagtagtataggactatatataggtttttattatagggtatccttttgtgaactcaaagacctcgttttcaggggattttctgtttgatgtccttaaggattatcaattatgttatatatggtcttggataaaaataaaaaaaaaaaaaaaaa

SEQ ID NO: 383 - protein, 384 aa, Glycine max
MCGGAIISDFIPAGPASGARRVTADILWPSLRKRFSKPLLDDDFEAGFREFKDDSEIEDVDDEDDEDEEELKKKPFGFSRSSNKAASKPLSRGATTVKSVESKGQAEKCAKRKRKNQYRGIRQRPWGKWAAEIRDPRKGVRVWLGTFSTAEEAARAYDAEARRIRGKKAKVNFPDEPSGAASSKRLKANPEAQPMKKNLNSVKPKINQMFNFGDNLEGYYSPIDQVEQKPLVNQYVNRAPFAGNGVQVSPVTPSADVTAYFSSEHSSNSFDYSDLGWGEQVPKTPEISSLLSAAPLEGAADQVQKTNNSQDVVAAQDDSAKTLSEELADIESQLKFFETPSFLDEAWADATLASLLGGDATHDAAGNPMNLWSFDDLPSMAGVF

SEQ ID NO: 384 - DNA, 1475 bp, Triticum aestivum
  CDS (122)..(1189)
  misc_feature (437)..(437): n is a, t, c, or g, or unknow, or other
atcatcacacacacacacacaccaacaccacaccaaccgacccgtctcgtctcgcaagcgtttcactctttccctttcctttcgcctcgctctacccgcggtcccacgtgctccagcagccatgtgcggcggcgccatcctctccgacatcatcccgccgccgcgccgggccaccggcggcaacgtctggcgggcggacaagaagaggcgggccaggcccgacgccgccgcggggaggccccgccgtgcgcccgaggaggagttccaggaggaggagggcgacgcggagttcgaggccgacttcgaggggttcgtggaggcggaggaggagtccgacggcgaggccaagcccttccccgtccgcaggagcggcttctccggagatggattgaaggcaactgctgctggtgatgatgactgtgcctcagggtctgctnaaaggaagagaaagaaccagttcaggggcatccgccgccgcccttggggtaaatgggctgctgaaataagagatcctcgcaagggtgtccgtgtctggcttggtacttacaactccgctgaggaagctgccagagcctatgatgttgaagcccgcagaattcgtggcaagaaggcagaggtcaatttcccagaagaagctcctatggctcctcagcaacgctgcgctactgctgtgaaggtgcccgagttcaacaccgaacagaagccggtactcaacaccatgggcaacgcagatgtgtattcctgctctgctgttgactacaccttaaatcagcaatttgtgcagcctcagaacatgtcgtttgtgcctacagtgaatgcagttgaggcccctttcatgaatttttcctctgaccagggtagcaactcctttagttgctcagacttcagctgggagaatgatatcaagacccctgacataacttctgtgcttgcatccattcccacctcaacagaggtcaatgaatctgcatttctccagaacaatggcatcaattcaacggtacctcctgtgatgggtgatgctaatgttgatcttgccgacttggagccatacatgaagttcctgatggacgatggttcagatgagtcaattgacagcattctaagctgtgatgtaccccaggatgtggtcggcaacatgggcctttggacctttgatgacatgcccttgtctgctggtttctactgagggaatcgaggtcgctgggtgcctgtatatatagacaaaggaataagtattcaggacatcaacaagtgcttgtgtctggtgcctctagaattgagcagtagcgatgtcagtctatggttatgtctagcttaaatggtcaggtgactggggtcttttgcaatagacctctgtcttgtgcccccagactatattatatctatatatgagaccagtatgtgatggggaactgcttattttgtattcatgtttctaccttattgtaattgctaaaaaaaaaaaaaaaaaa

SEQ ID NO: 385 - protein, 355 aa, Triticum aestivum
  MISC_FEATURE (106)..(106): Xaa is unknown or other, preferably Lys, Gln or Glu
MCGGAILSDIIPPPRRATGGNVWRADKKRRARPDAAAGRPRRAPEEEFQEEEGDAEFEADFEGFVEAEEESDGEAKPFPVRRSGFSGDGLKATAAGDDDCASGSAXRKRKNQFRGIRRRPWGKWAAEIRDPRKGVRVWLGTYNSAEEAARAYDVEARRIRGKKAEVNFPEEAPMAPQQRCATAVKVPEFNTEQKPVLNTMGNADVYSCSAVDYTLNQQFVQPQNMSFVPTVNAVEAPFMNFSSDQGSNSFSCSDFSWENDIKTPDITSVLASIPTSTEVNESAFLQNNGINSTVPPVMGDANVDLADLEPYMKFLMDDGSDESIDSILSCDVPQDVVGNMGLWTFDDMPLSAGFY

SEQ ID NO: 386 - DNA, 1413 bp, Nicotiana tabacum
  CDS (94)..(1257)
gaattcggcacgagaaaaaagaaagaagtttactccgtcaaaaacgaaactgatttctgcataaaacttttctgctgagagaaaacaaaaagcatgtgtggtggtgctataatctccgattacattgccccgagccgaacttctcgccggctcaccgccgagttgctatggggccggtccgatctgagtaataagcaaaaaaatcctaacaattatcactccaagccgttgagatcccaagtagttgacctagacgatgacttcgaggctgattttcaggactttaaagatttctccgatgacgaggatgttcaagtcgatgtcaagccatttgccttctctgcttcgaaaaactctaatgttgaaggctccaaatctgtgaaaactgatgattcagacaaggatgctgatagatcctctaagagaaagaggaagaatcagtatagggggatcagacagcgaccttggggtaagtgggcagctgaaatacgtgacccaagaaaaggggttcgggtgtggctgggaactttcaatactgcagaagaagctgccagagcttatgatgttgaggctaggaggatcagaggcaataaagctaaggtaaactttcccgatgaagctccagtgcctgcctcgagacgtactgttaaggtgaatcctcaaaaggtccttcctaaggagatcctggactcggttcagcccgactcgactatcataaacaacatggaggattgctgttatgattctttgggatttcttgaagagaaacccatgacgaagcagtttggatgtgaggatgggagcagtgcttctggagatacgggatttggctcatttgccccttcagctggtaccgatatctacttcaactctgatgttggaagtaactcttttgactgctctgattttggttggggagagccatgtgccaggactccagagatatcatccgttctgtcagctgttattgaaagcaatgaatctcaacttgttgaagatgataccagtccaatgaaaaaactgaaatcaagccccattaatccagtagctgatgatggaaataccgcaaacaagctatctgaagagctttcagcttttgaaacccagatgaagttccttcagatcccctatctggagggaaattgggatgcatcagttgatactttcctcaactcaagtgcaactcaggatggtgataatgctatggacttatggtcctttgatgatgttccttctttattgggaggtgtcttttaagtcagcatgccttgtctagtttttgtaaataaggcttcatgtgagtgaactttgctattgttttgcctcaaagaaaggctctttattatgtacagaagctttttgaaatggtaaatagtttaatctctgtttaaaaaaaaaaaaaaaaaaaaaaaa

SEQ ID NO: 387 - protein, 387 aa, Nicotiana tabacum
MCGGAIISDYIAPSRTSRRLTAELLWGRSDLSNKQKNPNNYHSKPLRSQVVDLDDDFEADFQDFKDFSDDEDVQVDVKPFAFSASKNSNVEGSKSVKTDDSDKDADRSSKRKRKNQYRGIRQRPWGKWAAEIRDPRKGVRVWLGTFNTAEEAARAYDVEARRIRGNKAKVNFPDEAPVPASRRTVKVNPQKVLPKEILDSVQPDSTIINNMEDCCYDSLGFLEEKPMTKQFGCEDGSSASGDTGFGSFAPSAGTDIYFNSDVGSNSFDCSDFGWGEPCARTPEISSVLSAVIESNESQLVEDDTSPMKKLKSSPINPVADDGNTANKLSEELSAFETQMKFLQIPYLEGNWDASVDTFLNSSATQDGDNAMDLWSFDDVPSLLGGVF

SEQ ID NO: 388 - DNA, 1068 bp, Triticum aestivum
  CDS (1)..(1068)
atgtgcggcggcgccatcctctccgacatcatcccgccgccgcgccgggccaccggcggcaacgtctggcgggcggacaagaagaggagggccaggcccgacgccgccgcggggaggccccgccgcgtgcccgaggaggagttccaggaggaggagagcgacgcggagttcgaggccgacttcgaggggttcgtggaggcggaggaggagtccgacggcgaggccaagcccttccccgtccgcaggagcggcttctccggagatggattgaaggcaactgctgctggtgatgatgactgtgcttcagggtctgctaaaaggaagagaaagaaccagttcaggggcatccgccgccgcccttggggtaaatgggctgctgaaataagagatcctcgcaagggtgtccgtgcctggcttggcacttacaactctgctgaggaagctgtcagagcctatgatgttgaagcccgcagaattcgtggcaagaaggcaaagtcaatttcccagaagaagctcccatggctcctcagcaaacgctgcgctacctctgtgaaggtgcccgagttcaacaccgaacagaagccagtactcaacaccatgggcaacgcagatgtgtattcctgccctgctgttgactacaccttaaatcagcaatttgtgcagcctcagaacatgtcgtttgtgcctacagtgaatgcagttgaggctcctttcatgaatttttcctctgaccaggggagcaactcctttagttgctcagacttcagctgggagaatgatatcaagacccctgacataacttctgtgcttgcatccattcccacctcaactgaggtcaatgaatctgcatttctccagaacaatggcattaattcaacggtacctcctgtgatgggtgatgctaatgttgatcttgcctacttggagccgtacatgaagttcctgatggacgatggttcagatgagtcaattgacagcattctaagctgtgatgtaccgcaggacgttgtcggcaacatgggcctttggacctttgatgacatgcccttgtctgctggtttctactga

SEQ ID NO: 389 - protein, 355 aa, Triticum aestivum
MCGGAILSDIIPPPRRATGGNVWRADKKRRARPDAAAGRPRRVPEEEFQEEESDAEFEADFEGFVEAEEESDGEAKPFPVRRSGFSGDGLKATAAGDDDCASGSAKRKRKNQFRGIRRRPWGKWAAEIRDPRKGVRAWLGTYNSAEEAVRAYDVEARRIRGKKAKSISQKKLPWLLSKRCATSVKVPEFNTEQKPVLNTMGNADVYSCPAVDYTLNQQFVQPQNMSFVPTVNAVEAPFMNFSSDQGSNSFSCSDFSWENDIKTPDITSVLASIPTSTEVNESAFLQNNGINSTVPPVMGDANVDLAYLEPYMKFLMDDGSDESIDSILSCDVPQDVVGNMGLWTFDDMPLSAGFY

SEQ ID NO: 390 - DNA, 999 bp, Triticum aestivum
  CDS (1)..(999)
atgtgcggcgggcgccatcctctccgacatcatcccgccgcggggaggccctgccgtgcgcctgaggaggagttccaggaggaggagggcgacgcggagttcgaggccgacttcgaggggttcgtggaggcggaggaggagtccgacggcgaggccaagcccttccccgtccgcaggagcggcttctccggagatggattgaaggcaactgctgctggtgatgatgactgtgcctcagggtctgctaaaaggaagagaaagaaccagttcaggggcgtccgccgccgcccttggggtaaatgggctgctgaaataagagatcctcgcaagggtgtccgtgtctggcttggtacttacaactccgctgaggaagctgccagagcctatggtgttgaggcccgcagaattcgtggcaagaaggcaaaggtcaatttcccagaagaagctcctatggctcctcagcaacgctgcgctactgctgtgaaggtgcccgagttcaacaccgaacagaagccggtactcaacaccatgggcaacgcagatgtgtattcctgctctgctgttgactacaccttaaatcagcaatttgtgcagcctcagaacatgtcgtttgtgcctacagtgaatgcagttgaggcccctttcatgaatttttcctctgaccagggtagcaactcctttagttgctcagacctcagctgggagaatgatatcaagacccctgacataacttctgtgcttgcatccattcccacctcaacagaggtcaatgaatctgcatttctccagaacaatggcatcaattcaacggtacctcctgtgatgggtgatgctaatgttgatcttgccgacttggagccatacatgaagttcctgatggacgatggttcagatgagtcaattgacagcattctaagctgtgatgtaccccaggatgtggtcggcaacatgggcctttggacctttgatgacatgcccttgtctgctggtttctactga

SEQ ID NO: 391 - protein, 332 aa, Triticum aestivum
MCGGRHPLRHHPAAGRPCRAPEEEFQEEEGDAEFEADFEGFVEAEEESDGEAKPFPVRRSGFSGDGLKATAAGDDDCASGSAKRKRKNQFRGVRRRPWGKWAAEIRDPRKGVRVWLGTYNSAEEAARAYGVEARRIRGKKAKVNFPEEAPMAPQQRCATAVKVPEFNTEQKPVLNTMGNADVYSCSAVDYTLNQQFVQPQNMSFVPTVNAVEAPFMNFSSDQGSNSFSCSDLSWENDIKTPDITSVLASIPTSTEVNESAFLQNNGINSTVPPVMGDANVDLADLEPYMKFLMDDGSDESIDSILSCDVPQDVVGNMGLWTFDDMPLSAGFY

SEQ ID NO: 392 - DNA, 1003 bp, Lycopersicon esculentum
  CDS (79)..(861)
gaaaacttttctatacatttttcatttctgtatcaatcaatattctttgtttctgctgttttgagtaaacacactaagatgtgtggtggtgcaattcttgctgatatcattcctcctcgtgaccgccgtttgtcatccaccgacctatggccgactgatttctggccaatttccacccaaaatgttcctctcaaccccaaacgagctcgaccctctacaggtggtgagcagatgaagaagaggcaaaggaagaatctttacagagggataagacaacgtccatggggtaaatgggctgctgaaattcgtgacccgagaaaaggggttagggtttggttaggtactttcaacactgctgaagaagctgcaagagcttatgatagagaagctcgtaaaatcaggggtaagaaagctaaagttaatttccccaatgaagatgacgaccattactgctacagtcatccagagccccctcccttgaacattgcttgtgatactactgttacttacaatcaagaatcaaataactgttaccccttttactcaatcgagaacgttgaacctgttatggaatttgcaagttataatggaattgaagatggaggagaggagatggtgaaaaatttgaataacagggttgtagaggaagaggagaaaacagaggatgaagtgcagatactttctgatgagctgatggcttatgagtcattgatgaagttctatgaaataccgtatgttgacgggcaatcagtggcggcgacggtgaatccagcggcggagaccgccgtgggcggtggctcgatggagctttggagttttgatgatgttagtcgtgtacaaccaagttataatgtagtttaattattgttttgtttaaacttttcataattttattttatcgaattaggaagaattgagtttttataatttaatcaattgtgtaaaactatgtttctaattcattaatattatattggatatgttgttatcaaaaaaaaaaaaa

SEQ ID NO: 393 - protein, 260 aa, Lycopersicon esculentum
MCGGAILADIIPPRDRRLSSTDLWPTDFWPISTQNVPLNPKRARPSTGGEQMKKRQRKNLYRGIRQRPWGKWAAEIRDPRKGVRVWLGTFNTAEEAARAYDREARKIRGKKAKVNFPNEDDDHYCYSHPEPPPLNIACDTTVTYNQESNNCYPFYSIENVEPVMEFASYNGIEDGGEEMVKNLNNRVVEEEEKTEDEVQILSDELMAYESLMKFYEIPYVDGQSVAATVNPAAETAVGGGSMELWSFDDVSRVQPSYNVV

SEQ ID NO: 394 - DNA, 1451 bp, Triticum aestivum
  CDS (49)..(1098)
ctttcctttcgcttagctctccacccgcggccccacgtgctcccagccatgtgcggcggcgccatcctctccgacatcatcccgccgccgcgccggcccgccggcggccgcctctggcaggcggacaggaagaagaggagggccgggccccgccgcgtgcccgaggaggagcccgaggaggaggcggaggagggcgacgaggacttcgaggccgacttcgaggggttcgtggacgaggagtccgacggcgaggtcaagcccttccccgcccgcaggagcggcttctccggagatggattgaaggcaactgctgctggtgaatatgactgtgcctcagggtctgctaaaaggaagagaaagaaccagttcaggggcatccgccgccgcccttggggtaaatgggctgctgaaataagagatcctcgcaagggtgtccgtgtctggcttggtacttacaactccgctgaggaagctgccagagcctatgatgttgaagcccgcagaattcgtggcaagaaggcaaaggtcaatttcccagaagaagctcctatggctcctcagcaacgctgcgctactgctgtgaaggtgcccgagttcaacaccgaacagaagccggtactcaacaccatgggcaacgcagatgtgtattcctgctctgctgttgactacaccttaaatcagcaatttgtgcagcctcagaacatgtcgtttgtgcctacagtgaatgcagttgaggcccctttcatgaatttttcctctgaccagggtagcaactcctttagttgctcagacttcagctgggagaatgatatcaagacccctgacataacttctgtgcttgcatccattcccacctcaacagaggtcaatgaatctgcatttctccagaacaatggcatcaattcaacggtacctcctgtgatgggtgatgctaatgttgatcttgccgacttggagccatacatgaagttcctgatggacgatggttcagatgagtcaattgacagcattctaagctgtgatgtaccccaggatgtggtcggcaacatgggcctttggacctttgatgacatgcccttgtctgctggtttctactgagggaatcgaggtcgctgggtgcctgtatatatagacaaagggaataagtattcaggacatcaacaagtgcttgtgtctggtgcctctagaattgagcagtagcgatgtcagtctatggttatgtctagcttaaatggtcaggtgactgaggtcttttgcaatagacctctgtcttgtgcccccagactatacttatatctatatatgagaccagtatgtgatggggaactgcttattttgtattcatgtttctaccttattgtaactgctacaagaggctgtaaaccttttaaatttgaagccagtgtttgttctgttgtgcttaaaaaaaaaaaaaaaaaaaaagtatctgc

SEQ ID NO: 395 - protein, 349 aa, Triticum aestivum
MCGGAILSDIIPPPRRPAGGRLWQADRKKRRAGPRRVPEEEPEEEAEEGDEDFEADFEGFVDEESDGEVKPFPARRSGFSGDGLKATAAGEYDCASGSAKRKRKNQFRGIRRRPWGKWAAEIRDPRKGVRVWLGTYNSAEEAARAYDVEARRIRGKKAKVNFPEEAPMAPQQRCATAVKVPEFNTEQKPVLNTMGNADVYSCSAVDYTLNQQFVQPQNMSFVPTVNAVEAPFMNFSSDQGSNSFSCSDFSWENDIKTPDITSVLASIPTSTEVNESAFLQNNGINSTVPPVMGDANVDLADLEPYMKFLMDDGSDESIDSILSCDVPQDVVGNMGLWTFDDMPLSAGFY

SEQ ID NO: 396 - DNA, 1568 bp, Arabidopsis thaliana
  CDS (131)..(1207)
aaaaacaacaaagcaaagcgttgaagagagaagaagaagcaaagatataacccccaaaagtatcaattagtttccattttcgccgctaagattctgttttcgaacatttacaccctcaagaatcgccgccatgtgtggaggagctataatatccgatttcattccaccgccgaggtctcgccgtgttactagcgagtttatttggccggatctgaagaagaatttgaaaggatcgaagaaaagctcgaagaatcgttcgaatttcttcgattttgacgctgagttcgaagctgatttccaaggtttcaaagatgattcgtctatcgattgcgatgatgatttcgacgtcggtgatgttttcgccgatgtgaaaccattcgttttcacttcgactccaaaacccgccgtctccgccgctgcggaaggttcagtttttggtaagaaagttactggcttggatggggaagctgagaaatctgcaaataggaagaggaagaatcagtaccgagggattaggcaacgtccttggggaaaatgggctgctgagatacgtgatccaagggaaggtgctagaatctggcttggaacgttcaagacagctgaggaagctgctagagcttacgatgctgcagcgcggagaatccgtggatctaaagctaaggtgaatttccctgaagaaaacctgaaggctaattctcagaaacgctctgtgaaggctaatcttcagaaaccagtggctaaacctaaccctaacccaagtccagctttggttcagaactcgaacatctcctttgaaaatatgtgtttcatggaggagaaacaccaagtgagcaacaacaacaacaaccagtttgggatgacaaactccgttgatgctggatgtaatgggtatcagtatttcagctctgaccagggtagtaattctttcgattgttcggagtttggttggagcgatcaagctccgataactcccgacatctcttctgcggttatcaacaacaacaactcagctctgttctttgaggaagccaatccagctaagaagctcaagtctatggatttcgagacaccttacaacaacactgaatgggacgcttcactggatttcctcaacgaagatgctgtaacgactcaggacaatggtgcaaaccctatggacctatggagtattgatgaaattcattccatgattggaggagtcttctgaagagatccagtttcatgtaaataaggctgcatgtttgtgagtttcccgcatcgttcgtttatcaacctccaaaactttctaatgtctgttacttgcatcttcttctgctgtctctgtctgtctctctcaggagttcctgtttgcattgcgagaagccatgagcctctatcttgagggtagttgtgatgaagttaagtagaggcttatttttaggggttgtggtagtttttgttttagtgaatcttttgaattcgtttgtgttttgtttttgttactttatgccccaaaactcctttaacatttgtcataatgtgtttgaacctcctcatctgtttaatcaaataaatcttctttgtatgct

SEQ ID NO: 397 - protein, 358 aa, Arabidopsis thaliana
MCGGAIISDFIPPPRSRRVTSEFIWPDLKKNLKGSKKSSKNRSNFFDFDAEFEADFQGFKDDSSIDCDDDFDVGDVFADVKPFVFTSTPKPAVSAAAEGSVFGKKVTGLDGEAEKSANRKRKNQYRGIRQRPWGKWAAEIRDPREGARIWLGTFKTAEEAARAYDAAARRIRGSKAKVNFPEENLKANSQKRSVKANLQKPVAKPNPNPSPALVQNSNISFENMCFMEEKHQVSNNNNNQFGMTNSVDAGCNGYQYFSSDQGSNSFDCSEFGWSDQAPITPDISSAVINNNNSALFFEEANPAKKLKSMDFETPYNNTEWDASLDFLNEDAVTTQDNGANPMDLWSIDEIHSMIGGVF

SEQ ID NO: 398 - DNA, 1636 bp, Arabidopsis thaliana
  CDS (137)..(1276)
ggagagtaacatcgagacaaagaagaaaagctaaaaaagagaaccccaaagaatcgaatatttattatttcgccccgaagattctatttctgatcatttacacccctaaaaagagtagagctttcgtgaagccaccatgtgtggaggagctataatctccgatttcatacctccgccgaggtccctccgcgtcactaacgagtttatctggccggatctgaaaaacaaagtgaaagcttcaaagaagagatcgaataagcgatccgatttcttcgatcttgacgatgatttcgaagctgatttccaagggtttaaggatgactcggcttttgactgcgaagacgatgatgatgtcttcgtcaatgttaagcctttcgtcttcaccgcaactactaagcccgtagcttccgctttcgtctccactggtatatatttggtaggttcagcatatgccaagaaaactgtagagtccgctgagcaagctgagaaatcttctaagaggaagaggaagaatcagtaccgagggattaggcagcgtccttggggaaaatgggctgcggagatccgtgatccgagaaaaggctcccgagaatggcttggaacattcgacactgctgaggaagcagcaagagcttatgatgctgcagcacgcagaatccgtggcacgaaagctaaggtgaattttcccgaggagaagaaccctagcgtcgtatcccagaaacgtcctagtgctaagactaataatcttcagaaatcagtggctaaaccaaacaaaagcgtaactttggttcagcagccaacacatctgagtcagcagtactgcaacaactcctttgacaactcttttggtgatatgagtttcatggaagagaagcctcagatgtacaacaatcagtttgggttaacaaactcgttcgatgctggaggtaacaatggataccagtatttcagttccgatcagggcagtaactccttcgactgttctgagttcgggtggagtgatcacggccctaaaacacccgagatctcttcaatgcttgtcaataacaacgaagcatcatttgttgaagaaaccaatgcagccaagaagctcaaacctaactctgatgagtcagacgatctgatggcataccttgacaacgccttgtgggacaccccactagaagtgaaagccatgcttggcgcagatgctggtgctgtgactcaggaagaggaaaacccagtggagctatggagcttagatgagatcaatttcatgctggaaggagacttttgaagtgatcgatggttccttagtttgtaaataaagctgtgttggattttgctgttgggggatggtacaagtcacacctcaagctctatgcattggtatctcatgagcctctcttccatagagagtttctcttttaattttgtcgaaataaaaaaggtgtgatgaagtaaatagaggtataataatatctatctattaagtcttgttttgttctttcatttttgtatttcttttctatttaaaagacagtttattagtcttctgagctctctttttgatctttgttatagcgtatcatcaccctcgaaagtgtaatgttttgtacccccaaacttgtttagcattataataaagtctctttgg

SEQ ID NO: 399 - protein, 379 aa, Arabidopsis thaliana
MCGGAIISDFIPPPRSLRVTNEFIWPDLKNKVKASKKRSNKRSDFFDLDDDFEADFQGFKDDSAFDCEDDDDVFVNVKPFVFTATTKPVASAFVSTGIYLVGSAYAKKTVESAEQAEKSSKRKRKNQYRGIRQRPWGKWAAEIRDPRKGSREWLGTFDTAEEAARAYDAAARRIRGTKAKVNFPEEKNPSVVSQKRPSAKTNNLQKSVAKPNKSVTLVQQPTHLSQQYCNNSFDNSFGDMSFMEEKPQMYNNQFGLTNSFDAGGNNGYQYFSSDQGSNSFDCSEFGWSDHGPKTPEISSMLVNNNEASFVEETNAAKKLKPNSDESDDLMAYLDNALWDTPLEVKAMLGADAGAVTQEEENPVELWSLDEINFMLEGDF

SEQ ID NO: 400 - DNA, 1391 bp, Lycopersicon esculentum
  CDS (87)..(1205)
ttcaaattgagctttttctccattaaaattctctctgcaaatttatagtttttcttttttcactttttgagaagaaatcaaaagctatgtgtggtggtgcaattatctccgatttggtacctcctagccggatttctcgccggttaaccgctgattttctatggggtacatccgatctgaacaagaagaagaagaaccctagtaattaccactcaaagcccttgaggtctaagtttattgaccttgaagatgaatttgaagctgactttcagcacttcaaggataattctgatgatgatgatgatgtgaaggcatttggccccaaatccgtgagatctggtgattcaaactgcgaagctgacagatcctccaagagaaagaggaagaatcagtaccgggggatcagacagcgtccttggggtaagtgggcagctgaaatacgtgatccaaggaaaggtattcgagtctggcttggtactttcaattcagccgaagaggcagccagagcttatgatgctgaggcgcgaaggatcagaggcaagaaagctaaggtgaactttcctgatgaagctccagtgtctgtttcaagacgtgctattaagcaaaatccccaaaaggcacttcgtgaggaaaccctgaacacagttcagcccaacatgacttatattagtaacttggatggtggatctgatgattcgttcagttttttcgaagagaaaccagcaaccaagcagtacggcttcgagaatgtgtcttttactgctgtagatatgggactgggctcagtttccccttcagctggtacaaatgtttacttcagctctgatgaagcaagtaacacttttgactgctctgatttcggttgggctgaaccgtgtgcaaggactccagagatctcatctgttctgtcggaagttctggaaaccaatgagactcattttgatgatgattccagaccagagaaaaaactgaagtcctgttccagcacttcattgacagttgacggtaacactgtgaacacgctatctgaagagctatcggcttttgaatcccagatgaagttcttgcagatcccatatctcgagggaaattgggatgcatcggttgatgccttcctcaatacaagtgcaattcaggatggtggaaacgccatggacctttggtccttcgatgatgtaccttctttaatgggaggtgcctactaagctgcatacacatcttcccctgctaagttttgtaaataacgcttcatttgagtgaagtttgcgcctgcgtttacgtttatcaccaaactaaaagactatatatgtgttgtattaatttattcaaaatttactcgtttgatatatgtaagtatgtatccttgttttcataaaaaaaaaaaaaaaaaa

SEQ ID NO: 401 - protein, 372 aa, Lycopersicon esculentum
MCGGAIISDLVPPSRISRRLTADFLWGTSDLNKKKKNPSNYHSKPLRSKFIDLEDEFEADFQHFKDNSDDDDDVKAFGPKSVRSGDSNCEADRSSKRKRKNQYRGIRQRPWGKWAAEIRDPRKGIRVWLGTFNSAEEAARAYDAEARRIRGKKAKVNFPDEAPVSVSRRAIKQNPQKALREETLNTVQPNMTYISNLDGGSDDSFSFFEEKPATKQYGFENVSFTAVDMGLGSVSPSAGTNVYFSSDEASNTFDCSDFGWAEPCARTPEISSVLSEVLETNETHFDDDSRPEKKLKSCSSTSLTVDGNTVNTLSEELSAFESQMKFLQIPYLEGNWDASVDAFLNTSAIQDGGNAMDLWSFDDVPSLMGGAY

SEQ ID NO: 402 - DNA, 1584 bp, Oryza sativa
  CDS (80)..(1270)
gagcggcagcaagtgttcactgcgttcttcttctcgatttatctttcttggtttcttgatctgtagcttattagcggccatgtgcggcggagcaatcatctccgggttcatcccgccgtcggccgctgcggcggcggcggctgcggcggccaagaagcagcagggcaggagggtcacggccgacgtgctgtggccggggatgctgcggaaggggaaggcggcggcggcggaggaggactttgaggccgacttccgcgagttcgagcgtggcatgagcgacgacgaggcggaggggggcggcggcgaggaggaggaggacgacgacgacgtggtcgtggtggtccccccgccggcggcggcgaggttcgtcgtccgtgccgcggccaaggcggcgcccccaactgcagatgggatgttgactacaaagcttgtccaacatgatggacctactgctagatcagcaaagcacaagaggaagaatcagtacagggggatccgccagcgtccctggggcaaatgggcagctgaaatccgagaccccagcaagggtgtccgtgtttggcttggaacatataacactgctgaggaggcagctagggcatatgacgctgaagcccgcaagatccgtggcaagaaagccaaggtcaactttcctgatgaaccagctgttgctcaaaagctctccctgaagcaaaacgctgccaagcaagagaaactagctccacctctgaagacctgtggcgatgatgctttctttcagctaaacagttcagacaatgatttgtttgcaatgcttgcaaaggtgcctgcaaagccggcagagcctgttgatctcatgcctccagtcaaacctcttgcttccactgagacattcgagatgaacatgctctctgatacgagcagcaactcatttggctcttcagactttggttgggaggatgacaccctgaccccagactacacttcagtcttcgttcctaatgctgccatgccagcatatggtgaacctgcttacctgacaggtggagcgccaaagagaatgaggaacaactatggtatcgccgtgccccagggaaatggcatgcctaatctcgcacaaaacatgcccaccttcgatcccgagatgaagtatttgccattaccttatgttgagagcagctcagatgaatcaatggacaaccttctgcaaaatgatgctacacaagacggggcaagcaacgagggcatctggagccttgatgagctgctcatggcagctggtgcctactgaggagacgaaatgttctggtcagtgtggtctgtcactagcaaaccatgttgaatgtgtatggccaagatgaagagctggtgatgtctgctatgttttgtagagggatgctaccaaagtaatgctagaatattacaagctgctatcagctgtactctctatgacaatgtttatactatgtttgctgtatggtgtggtctatgatttgaagtatgttggagactgattcaaataatgccttggccatgtgtgtgctgtaatgtgcttattaagttatatagttgggctcatattgcgtatctaaaaaaaaaaaaaaa

SEQ ID NO: 403 - protein, 396 aa, Oryza sativa
MCGGAIISGFIPPSAAAAAAAAAAKKQQGRRVTADVLWPGMLRKGKAAAAEEDFEADFREFERGMSDDEAEGGGGEEEEDDDDVVVVVPPPAAARFVVRAAAKAAPPTADGMLTTKLVQHDGPTARSAKHKRKNQYRGIRQRPWGKWAAEIRDPSKGVRVWLGTYNTAEEAARAYDAEARKIRGKKAKVNFPDEPAVAQKLSLKQNAAKQEKLAPPLKTCGDDAFFQLNSSDNDLFAMLAKVPAKPAEPVDLMPPVKPLASTETFEMNMLSDTSSNSFGSSDFGWEDDTLTPDYTSVFVPNAAMPAYGEPAYLTGGAPKRMRNNYGIAVPQGNGMPNLAQNMPTFDPEMKYLPLPYVESSSDESMDNLLQNDATQDGASNEGIWSLDELLMAAGAY

SEQ ID NO: 404 - DNA, 1407 bp, Oryza sativa
  CDS (23)..(1003)
agaaagaagagcgcgccgcgccatgtgcggcggtgcgatcctcgccgatttcaccccggcgagggtgccccggcggctgaccgccgccgagctcctgccggtgaccccgactccccccgccgccgagaggagaaccacccggaagcgcaagtccgacgtcgacttcgaggcggagttcgagcttttcgaggacgacgacgacgacgatgagttcgagctttccgacgatggcgacgagagtttggccgtgtcatgtgtgtcgtcccccaagtcgaaggcagtaccttcgttttctttttcgtcggatgtctcctcgagctccaggccgcggcggcgcgtggcggcggcggcggccggtcgtcggaaggcgagcaagaagagcaagtacaggggcgtccggcttcggccgtcggggaggttcgcggcggagatcagggaccccaagaaggggcggcgcgtgtggctcggcacgtacggcagcgccgaggaggccgccatggcctacgaccgcgaggcccgccgcatccgcggcaagggcgcgaggctcaacttcccccgcgacggcgatggctcccctcgccggagtaacgaccggccctgctggaccatcgacctcaacctccccgcggcggccgtctccggtgacgacgacgacgccatggccgtcgacgccgcagacgcagacgcaggcagtgctggccgtgcagcagcctatgcagatcaagaagcattgagcgcggcaaagtgcaagatcaagcagtgtcctcgcgacgaacagatggcgagcgccacacctgagctcatggaggaggacgcgagcagcagcagaaacatggtgcccctgtccatggcgctgcagctgcagtatgcggcgatgatcgccgaatgcgaccgcgagatggaggagatcgccgccgtggagagggacctcgagaggcgcaggaggcaggtgttcgagcgcagaggccaccttgtcaggcaggcctctcttctgctcgactgacgatcttgctgaactgaactctgaatgtttgagcttgtctgaagtctgaactctgcactatgccatatggtgtttcaccttcactgtgaggctgacatgtgggccagacgtccgtttgccttgcttgcttttgagctgcaactgggcgttgtgctgcaagcctgcaaagtgcctgtgtaaagtttgtgggattgtgtgtgtggatcttgtatccttgtgactttgcaagctttaattttgtgaggaacaatagtattttagcttgatgtgtaaaatatagaaataaataatagtagcaactaaattttggttttcagctcttcatcagatggtttgtcatgggaacaaaatttcaaacatgagcaaattaaggtcaaaaaaaaaaaaaaaaaaaaaaaaaaaaa

SEQ ID NO: 405 - protein, 326 aa, Oryza sativa
MCGGAILADFTPARVPRRLTAAELLPVTPTPPAAERRTTRKRKSDVDFEAEFELFEDDDDDDEFELSDDGDESLAVSCVSSPKSKAVPSFSFSSDVSSSSRPRRRVAAAAAGRRKASKKSKYRGVRLRPSGRFAAEIRDPKKGRRVWLGTYGSAEEAAMAYDREARRIRGKGARLNFPRDGDGSPRRSNDRPCWTIDLNLPAAAVSGDDDDAMAVDAADADAGSAGRAAAYADQEALSAAKCKIKQCPRDEQMASATPELMEEDASSSRNMVPLSMALQLQYAAMIAECDREMEEIAAVERDLERRRRQVFERRGHLVRQASLLLD

SEQ ID NO: 406 - DNA, 1653 bp, Fagus sylvatica
  CDS (137)..(1264)
caacaatattttctctcacaaaaactaaactctctgtatttcccaaactttccaaaaaaaccattttacttttcacccatccgagcaaaaaaaacaaagagaaaaaagaaacccctccaaaaaagccaagaccgccatgtgtggaggagctataatctccgactttatagcgccaaccgggtcgcggcggttgacggcggattatctctggggcgatcggaaaaaacccatttcaggaaagcgattctcgaagcctgtagtcgatttggacgacgaattcgagctcgattttcagggcttcaaggacgaggaggagtctgatatcgacgaggaagaggtccttgtgcaagatgtcaagcccttcactttttctgctcctcctagctctggatctaagcctgtaaaatccgtggaattcaatgggcaagctgagaaatctgcaaagagaaagaggaagaatcagtatcgggggatccggcagcgcccatggggtaagtgggctgctgagattcgagacccaaggaaaggggtccgtgtctggctcggaacttttaacactgcagaagaagctgcaagagcttatgatgcagaagcacggagaattcgtggcaagaaaagcaaagggaattttccgatgagacttcccgtgccaaagcgttcagttaaggcaaatctgcagaagccacttgccaaggcaaacctgaactctgtccagcccaacctgaaccaaaatttcaattttatgaactctgatcaggactataccatgggtttgatggaagagaaacctttcacgaaccagtatgggtatatggattccatccctgtcaatgcagatgttggactaaaatcctttgcttccaataatactgccccatactttaactcagatcaggggagtaactcgtttgattgttctgactatggatggggagaacagggctctaagactccagaaatctcatctgttctttcagccactttagaaggggatgaatctcagtttgtggaggatgctgtgcccacgaagaaattgaagtcagactctgggaatgcagtgttcattgaaaataacactgcaaagacactgtcagaggagctctcagcttttgagtcccagatgaactttcagatgccatttcttgagggaagctgggaatccaacatggaggcactgttcagtggggacacaactcaggatggtaactcgatggatctttggagcttcgatgacctccccgttatggctgggggagttctgtgagcaaactattcccatgcttgctagtttatgtaaataaggctacatgttagaatggtttgtcatctgtgatggacatgccgtttcaaacaagctgtgaacatgcttaagactcttatgaaggatgtactgaagtagtctactgttgtatgaggagtacataggtatttaggatccctttctcccttgaagacattgaatttgggattttgaatttgatctttgtattgatgattatgtgtgatctgtcataaaaatactaaaaacctgatgtatgtcaactttagtgtttgtttctatcttggttcttttacaaaaagggccttcaatttttgtactgtttatttgtttttattggtttttgattttacctaaaaaaaaaaaaaaaaaaa

SEQ ID NO: 407 - protein, 375 aa, Fagus sylvatica
MCGGAIISDFIAPTGSRRLTADYLWGDRKKPISGKRFSKPVVDLDDEFELDFQGFKDEEESDIDEEEVLVQDVKPFTFSAPPSSGSKPVKSVEFNGQAEKSAKRKRKNQYRGIRQRPWGKWAAEIRDPRKGVRVWLGTFNTAEEAARAYDAEARRIRGKKSKGNFPMRLPVPKRSVKANLQKPLAKANLNSVQPNLNQNFNFMNSDQDYTMGLMEEKPFTNQYGYMDSIPVNADVGLKSFASNNTAPYFNSDQGSNSFDCSDYGWGEQGSKTPEISSVLSATLEGDESQFVEDAVPTKKLKSDSGNAVFIENNTAKTLSEELSAFESQMNFQMPFLEGSWESNMEALFSGDTTQDGNSMDLWSFDDLPVMAGGVL

SEQ ID NO: 408 - DNA, 939 bp, Oryza sativa
  CDS (1)..(939)
atgtgcggcggtgcaatcctcgccgatttcaccccggcgagggtgccccggcggctgaccgccgccgagctcctgccggtgaccccgactccccccgccgccgagaggagaaccacccggaagcgcaagtccgacgtcgacttcgaggcggagttcgagcttttcgaggacgacgacgacgacgatgagttcgagctttccgacgatggcgacgagagtttggccgtgtcattttcgtcggatgtctcctcgagctccaggccgcggcggcgcgtggcggcggcggcggccggtcgtcggaaggcgagcaagaagagcaagtacaggggcgtccggcgccggccgtcggggaggttcgcggcggagatcagggaccccaagaaggggcggcgcgtgtggctcggcacgtacggcagcgccgaggaggccgccatggcctacgaccgcgaggcccgccgcatccgcggcaagggcgcgaggctcaacttcccccgcgacggcgatggctcccctcgccggagtaacgaccggccctgctggaccatcgacctcaacctccccgcggcggccgtctccggtgacgacgacgacgccatggccgtcgacgccgcagacgcagacgcaggcagtgctggccgtgcagcagcctatgcagatcaagaagcactgagcgcggcaaagtgcaagatcaagcagtgtcctcgcgacgaacagatggcgagcgccacacctgagctcatggaggaggacgcgagcagcagcagaaacatggtgcccctgtccatggcgctgcagctgcagtatgcggcgatgatcgccgaatgcgaccgcgagatggaggagatcgccgccgtggagagggacctcgagaggcgcaggaggcaggtgttcgagcgcagaggccacctggtcaggcaggcctctcttctgctcgactga

SEQ ID NO: 409 - protein, 312 aa, Oryza sativa
MCGGAILADFTPARVPRRLTAAELLPVTPTPPAAERRTTRKRKSDVDFEAEFELFEDDDDDDEFELSDDGDESLAVSFSSDVSSSSRPRRRVAAAAAGRRKASKKSKYRGVRRRPSGRFAAEIRDPKKGRRVWLGTYGSAEEAAMAYDREARRIRGKGARLNFPRDGDGSPRRSNDRPCWTIDLNLPAAAVSGDDDDAMAVDAADADAGSAGRAAAYADQEALSAAKCKIKQCPRDEQMASATPELMEEDASSSRNMVPLSMALQLQYAAMIAECDREMEEIAAVERDLERRRRQVFERRGHLVRQASLLLD

SEQ ID NO: 410 - DNA, 1249 bp, Oryza sativa
  CDS (95)..(1099)
acaaaggcattcgcaacacacacttgaagaaaaaaaacacgacgaacacgttaaaaaaaggtcgaagagaagtgggagacccaaaccgcgaacaatgtgtggaggcgccatcctcgccgagttcatcccggcgccgtcgcgcgccgcggcggcgaccaagcgggtgaccgccagccacctgtggccggccggctccaagaacgccgcccgcggcaagagcaagagcaagaggcagcagaggagcttcgccgacgtcgacgacttcgaggccgccttcgagcagttcgacgatgactccgacttcgacgacgcggaggaagaagacgaaggacacttcgtgttcgcgtccaaatctcgtgtcgtcgccgggcacgacgggcgcgcggcggcgagggcggcgagcaagaagaagcgggggcggcacttccgaggcatccggcagcggccatgggggaagtgggcggcggagatccgcgacccgcacaagggcacgcgcgtctggctcggcacgttcaacaccccggaggaggccgcacgcgcctacgacgtcgaggcgcgccgcctccgcggcagcaaggccaaggtcaacttccccgccacgcccgccgccgcgcgcccacgccgcggcaacacgagagccaccgccgtaccaccgccggcgacagcacccgccgccgccccgccgcgcggactgaagcgagaattctcgccgcctgctgagaccgcgctacctttcttcaccaacggcttcgtcgacctgacgaccgccgcggcgccgccaccggccatgatgatgacgagctccttcaccgacagcgtcgccacgtcggagtccggcgggagccccgccaagaaggcgaggtccgacgacgtcgactcgtccgagggcagcgtcggcggcggcagcgacacgctgggtttcaccgacgagctggagttcgacccgttcatgctgttccagctcccctactccgacggctacgagtccatcgacagcctcttcgccgccggcgacgccaacagcgcgaacaccgacatgaacgccggcgtcaacctgtggagcttcgacgacttcccaatcgacggcgcccttttctgatgtactcctccattgatgcagtttgtgcactcaattgtaagcatctgaattcacttccattttaatggattcagttaaaaacttaaaatccatctgttcatcaggattatatatcttgatcagataccatgccatttcttggttcaggtt

SEQ ID NO: 411 - protein, 334 aa, Oryza sativa
MCGGAILAEFIPAPSRAAAATKRVTASHLWPAGSKNAARGKSKSKRQQRSFADVDDFEAAFEQFDDDSDFDDAEEEDEGHFVFASKSRVVAGHDGRAAARAASKKKRGRHFRGIRQRPWGKWAAEIRDPHKGTRVWLGTFNTPEEAARAYDVEARRLRGSKAKVNFPATPAAARPRRGNTRATAVPPPATAPAAAPPRGLKREFSPPAETALPFFTNGFVDLTTAAAPPPAMMMTSSFTDSVATSESGGSPAKKARSDDVDSSEGSVGGGSDTLGFTDELEFDPFMLFQLPYSDGYESIDSLFAAGDANSANTDMNAGVNLWSFDDFPIDGALF

SEQ ID NO: 412 - DNA, 966 bp, Oryza sativa
  CDS (1)..(966)
atgtgtggcggcgcgattctggctaacatcataccggccacgccgccgcggcccgccacggcggcgcatgtgtggcccggcggcgacggggagaagcggcggaaggttggtggaggcgggtgtgatgacgacttcgaggcggcgtttgagagattcggacgtgaggactctgagatggaggaggaggaggtggaggaggtggtggttgggaagaaggcggcggtgaggcggcggagggcgacgcccgccgccgggcgccgcgcgaggccgagcaagtactggggcgtgcggcgccggccgtgggggaagtgggcggcggagatccgcgaccccgtcgagggcgtccgcgtctggctcggcacgttcgccaccgccgaggccgccgcccacgcctacgacgccgccgcccgcgacctccgcggcgcgaccgccaagctcaacttcccctcctcctcctcctccaccgccgccaccccacgcccccgcaagtgccgccccaccaccgccaccgccacccccaaggcgacgacaccgaacgtcgtcgtcgtcgtcaacctcgtcgacaaagaggccgaggtcagcgagagctccggtgccagcagcagcgcgctgccggacttctcgtggcagggcatgtcggcgtcgtccgacgacgacgccgcggcgcagcaggcactcctcgacgccgccggcggcgccaagaagcgtccccggagcgagccccacgtcacctccgacgacgaagtgctcccggcgtcattcgacagtgacaacaacaccgccgccgccggcctgctcccgctcgacgatcctttcttgttcggcgaccagttcggcgacctcaacggcggcgcgttcgcctcgctcatggacgggctgttcgccgccggtgaagcgaacgtcgccggcgagagcgtggggctctggagcttcggcgacgactttctcaacgcgtcgtactattag

SEQ ID NO: 413 - protein, 321 aa, Oryza sativa
MCGGAILANIIPATPPRPATAAHVWPGGDGEKRRKVGGGGCDDDFEAAFERFGREDSEMEEEEVEEVVVGKKAAVRRRRATPAAGRRARPSKYWGVRRRPWGKWAAEIRDPVEGVRVWLGTFATAEAAAHAYDAAARDLRGATAKLNFPSSSSSTAATPRPRKCRPTTATATPKATTPNVVVVVNLVDKEAEVSESSGASSSALPDFSWQGMSASSDDDAAAQQALLDAAGGAKKRPRSEPHVTSDDEVLPASFDSDNNTAAAGLLPLDDPFLFGDQFGDLNGGAFASLMDGLFAAGEANVAGESVGLWSFGDDFLNASYY

SEQ ID NO: 414 - DNA, 990 bp, Oryza sativa
  CDS (1)..(990)
atgtgcggcggagcgatccttgcggagctcataccgagcgcgccggcggcgaggcgcgtcacggcgggccacgtctggccgggcgacgccaacaaggccaagaagaagggcgcgcgcgccgacgacttcgaggccgcgttccgcgacttcgacaacgactccgatgacgaggagatgatggtggaggaggcggaggaggaggaggcgacctccgagcacaagccgttcgtcttccgcgccaagaaggcggcggcggcggcgtcgagcaggcgcaggaagccggcgcagtacaggggcgtgcggcgccggccgtgggggaagtgggcggcggagatccgcgaccccgtcaagggcatccgcgtctggctcggcaccttcaccaacgccgaggccgccgcgctcgcctacgacgacgccgcgcgcgccatccgcggggacagggccaagctcaacttcccttccgctaccacccctgacacccgcaagcgcggccgcgccaccgccgccgccgccccggccgtcaaggcgaccccggtcatcaacctcgtcgaggaggaggacgaggaggaggtcgccgccgccatggcgtccatcaagtacgagcccgagaccagcgagagctccgagtcgaacgccctcccggacttctcctggcagggcatgtcggcctccgacgagttcgccgtcgccgcggcggcgctgtcgctcgacagcgacgacgacctcgccaagaagcgtccgaggaccgagccggaggacaccaccgactccggctccggcgacgacaccgacgcgctgttcgacgcgctgctgttcgccgaccagtacaaccacttcaacggcggcgcctacgagtccctggacagcctgttcagcgccgacgccgtgcagaccaccgccgccgccgccgccgccgaccagggcatggggctctggagcttcgacgacggctgctgcctcgtcgacgtcgaggccagcttgtccttctag

SEQ ID NO: 415 - protein, 329 aa, Oryza sativa
MCGGAILAELIPSAPAARRVTAGHVWPGDANKAKKKGARADDFEAAFRDFDNDSDDEEMMVEEAEEEEATSEHKPFVFRAKKAAAAASSRRRKPAQYRGVRRRPWGKWAAEIRDPVKGIRVWLGTFTNAEAAALAYDDAARAIRGDRAKLNFPSATTPDTRKRGRATAAAAPAVKATPVINLVEEEDEEEVAAAMASIKYEPETSESSESNALPDFSWQGMSASDEFAVAAAALSLDSDDDLAKKRPRTEPEDTTDSGSGDDTDALFDALLFADQYNHFNGGAYESLDSLFSADAVQTTAAAAAADQGMGLWSFDDGCCLVDVEASLSF

SEQ ID NO: 416 - DNA, 1612 bp, Oryza sativa
  CDS (97)..(1194)
gaagaagagagaactcgaactctcgcctaccatttcgcccccctccgcaagcaatccaccactgcatcggcggcgagggctcaccggcggcgagccatgtgcggcggcgccatcatccaccacctgaaggggcacccggaggggtcgcgccgggcgacggaggggctcctgtggcccgagaagaagaagcccaggtggggcggcggcgggaggcgccacttcggggggttcgtggaggaggacgacgaggacttcgaggccgacttcgaggagttcgaggtggactccggggactcggatttggagctcggggaggaggacgacgatgacgtcgtcgagatcaagccggccgccttcaagagggccctctccagagataacttgagcaccattaccactgccggatttgatggtcctgctgcaaagtctgcccaaagaaagagaaagaaccaattcaggggcatccgccaccgcccttggggtaagtgggctgctgaaatcagagatcctcgcaagggtgttcgtgtctggcttggcactttcaacagtgctgaagaagctgcaagagcttatgatgctgaagcacgcacgattcgtggcaagaagcccaaggtgaattttccagaggctccaacaactgctcagaagcgtcgtgctggctccaccactgctaaagcacccaagtcaagtgtggaacagaagcctactgtcaaaccagcattcaacaattgtgccaatgcaatggcgtttgtctacccatctgctaacttcacttcaaacaagccgtttgttcagcctgataacatgccatttgttcctgcaatgaactctgctgctcctattgaggaccctatcatcaactctgaacagggaagcaactcatttggctgttctgactttggctgggagaatgataccaagacaccagatattacatcaattgctcccatttcaaccatagctgaagtcgatgaatctgcattcattaagagcagtaccaacccaatggtccctcctgttatggagaacagtggtgttgatctgcctgatttagaacccaacatgaggttccttctggatgatggtggtggtgactcaattgatagccttttcaacctggatggatcacaggatgttgtcagcaacatggacctatggagctttgatgacatgcccgttagcgatttctattgaggaattcgaagtcttctagtcggagcatgtacacagggaaaaaaaaggaataaatactattggagattgggaggcacctgcatggcaccttgggggtagcatatcgttatgtttagcttacatgcaaaaggctgcatcctgaaactctttggtgattggacctgttccctatccgctgtctatgtatggcagccatctatgagactcaagaactgcttttttttttccgttctagttttctgtcgttgctacctgtatatggctatgaacatcgtgaatccatggccattatgttttaatgtatgttgttgagtgctctttctttcggtctttgctgtgctgcgctatgttggtgataactagctacccatattgaatttctgtccaaaaaaaaaaaaaaaaaaaaaaaaaaaaaaaa

SEQ ID NO: 417 - protein, 365 aa, Oryza sativa
MCGGAIIHHLKGHPEGSRRATEGLLWPEKKKPRWGGGGRRHFGGFVEEDDEDFEADFEEFEVDSGDSDLELGEEDDDDVVEIKPAAFKRALSRDNLSTITTAGFDGPAAKSAQRKRKNQFRGIRHRPWGKWAAEIRDPRKGVRVWLGTFNSAEEAARAYDAEARTIRGKKPKVNFPEAPTTAQKRRAGSTTAKAPKSSVEQKPTVKPAFNNCANAMAFVYPSANFTSNKPFVQPDNMPFVPAMNSAAPIEDPIINSEQGSNSFGCSDFGWENDTKTPDITSIAPISTIAEVDESAFIKSSTNPMVPPVMENSGVDLPDLEPNMRFLLDDGGGDSIDSLFNLDGSQDVVSNMDLWSFDDMPVSDFY

SEQ ID NO: 418 - DNA, 1677 bp, Oryza sativa
  CDS (82)..(1170)
gacaaatctcacgcactgtctctcgttcgcgcaaagcacgctgcttttctccgctttgcgagcaccatagcctagcccaccatgtgcggcggcgccatcctctccgacctcatcccgccgccgcggcgggtcaccgccggcgacctctggctggagaagaccaagaagcagcagcagcagaagaagaagaacaagggcgcgaggaggctgccactgcgccaagaggaggaggatgatttcgaggccgacttcgaggagttcgaggtggattccggcgagtgggaggtggagtccgacgccgacgaggccaagccgctcgccgcgccccggagcggcttcgctaaaggtggattgaaaaacactactgttgctggtgctgatgggcctgcagcaaggtctgctaaaaggaagagaaagaaccaattcaggggtatccgccagcggccatggggcaaatgggctgcggaaatcagagatcctcgcaaaggtgtccgcgtctggcttggcaccttcaactctcctgaggaagctgccagagcttatgatgctgaagcacgaaggattcgaggcaagaaggccaaggtcaatttcccagatggggctccagtggcttctcagaggagtcatgctgagccctcctccatgaacatgcctgctttcagcatcgaagagaagccggccgtcatgtcagcaggcaacaaaaccatgtacaacacaaatgcttatgcctaccctgctgttgagtacaccttacaggagccatttgtgcagattcagaatgtctcatttgttcctgcaatgaacgcgattgaggatactttcgtgaacctgtcctctgatcaagggagcaactcctttggttgctcggactttagccaggagaatgatatcaagacccctgacataacttccatgcttgcaccgaccatgacaggtgttgatgactccgcattcctccagaacaatgccagtgatgcaatggtacctcctgtgatggggaatgctagcattgatcttgctgacctggagccgtacatgaaatttctgatcgatggtggttcggatgagtcgattgacacccttctgagctctgatggatctcaggatgtggccagtagcatggacctttggagcttcgatgacatgcccgtgtcggccgagttctactgaggggtttggggtgtagcaactggtgcctgtatatataaggacaaatggaataaacattctggacatccaagaagcggcatgtgtctgtcgggcgcttctagttgcgctatatagctatgttagtatgttagtatgtgctgtgtctagcttagatgctgaagtctcaagtactatttggcagtgaaactatctatctgtaactgctatatgaggctggaacaagttacttagcttctaccttatctgtacttgctatagtggctgtgaaccttgtggatctgaactctgaagccaatgtttactatataatgtggttggttttataaactctagttgatttggacccctgtcaatggtcatgctatggctggggataagaaccattgatgatcatatttgactagaaacgctgcttccaaaatatcccataaagtaaagctgaacttgtactaatgttcttgcacaagttgcaataatgttgccttatggaaaaacagtttccggacc

SEQ ID NO: 419 - protein, 362 aa, Oryza sativa
MCGGAILSDLIPPPRRVTAGDLWLEKTKKQQQQKKKNKGARRLPLRQEEEDDFEADFEEFEVDSGEWEVESDADEAKPLAAPRSGFAKGGLKNTTVAGADGPAARSAKRKRKNQFRGIRQRPWGKWAAEIRDPRKGVRVWLGTFNSPEEAARAYDAEARRIRGKKAKVNFPDGAPVASQRSHAEPSSMNMPAFSIEEKPAVMSAGNKTMYNTNAYAYPAVEYTLQEPFVQIQNVSFVPAMNAIEDTFVNLSSDQGSNSFGCSDFSQENDIKTPDITSMLAPTMTGVDDSAFLQNNASDAMVPPVMGNASIDLADLEPYMKFLIDGGSDESIDTLLSSDGSQDVASSMDLWSFDDMPVSAEFY

SEQ ID NO: 420 - DNA, 1138 bp, Solanum tuberosum (potato)
  CDS (156)..(1052)
attcggcacgagaccaaaaccaaaaccaagcttctctcttgttataatatatatatatataaaaaaaactcgacctttgtacaaaccatttttcatatctgtatcaatctctttgtttctgccattttgagtaaaagagtttaaatcacactaaaatgtgtggtggtgcaattctttatgatattattcctcgtgaccgccgtttgtcatccaccgacttatggccaagctctgctgatttctggcaaacttcttctttttccaagccaatttccacccaaaatgttcctcccaagcctaaacgagctcaactctctagaggtagtgagcagatgaagaagaggcaaaggaagaatctttacaggggaatccgacaacgtccatggggtaaatgggctgctgaaattcgtgacccgagaaaaagggttagggtctggttaggtactttcaacactgctgaagctgcaagagcttatgatagagaagctcgtaaaatcaggggaaagaaagctaaagttaatttccccaatgaagacgacgaccactactacagtcatccagagccgcctcctttgaacattgtttatgaatcttatgatactactagtacttacaatcaagaatcaaataactgttaccccttccactcaatcgaaaacactgaacctgttatggaattcgcaattgctaacaaaaattcatctgggtctgcttataatggaattgaagatcagaatgtggaaggagaagagcagacggtgaaaaattcaaataacaggatcgtagaggaagaggaaaaaacagaggatgaagtgcagatactttctgatgaactgatggcttatgagtcattgatgaagttctatgaaataccgtatgttgacgggcaatcagtggcggcgacggtgaatccagcggcggacaccgaagtgggcggtggctcgatggagctttggagttttgatgatgttagtcgtctacaaccaagttataatgttagtttgattattgttttgtttaaattgttgcatctttttagtttgctgaattagaactaattgagtttttgtaatttttaatcaattgtgttgaaactatatttttahttcattactctattaaaaaaaaaaaaaaaaaa

SEQ ID NO: 421 - protein, 298 aa, Solanum tuberosum (potato)
MCGGAILYDIIPRDRRLSSTDLWPSSADFWQTSSFSKPISTQNVPPKPKRAQLSRGSEQMKKRQRKNLYRGIRQRPWGKWAAEIRDPRKRVRVWLGTFNTAEAARAYDREARKIRGKKAKVNFPNEDDDHYYSHPEPPPLNIVYESYDTTSTYNQESNNCYPFHSIENTEPVMEFAIANKNSSGSAYNGIEDQNVEGEEQTVKNSNNRIVEEEEKTEDEVQILSDELMAYESLMKFYEIPYVDGQSVAATVNPAADTEVGGGSMELWSFDDVSRLQPSYNVSLIIVLFKLLHLFSLLN

SEQ ID NO: 422 - DNA, 925 bp, Zea mays
  CDS (1)..(624)
atggttcaaccaaaaaagaagtttgtgtttcgtggagtccggcagcgccactggggctcctgggtctctgagatcaggcatcccctccttaagaggagggtctggctgggtacctttgagacggctgaggaggcagcgagagcatatgatgaggctgctgtgctgatgagcggacgcaacgccaagaccaacttcccaatccaaagaagcagcacaggggagcctaccccagctgcgggaagggacgcccgcagcaacttcagcagcggctcctctaccaccaacctgtcccagattctcagtgcgaagctccgcaaatgctgcaaggcgccatcaccgtccctgacctgtctccgccttgaccctgagaagtcccacattggtgtttggcagaagcgtgcaggagcccgtgctgactccaactgggtcatgacagtggagctcaacaaagatgcagcatccactgatgctgcatcacagtccacatcagcaacaactgctccaccagccacgccgatggatgaggaggagaggatcgcactgcaaatgatcgaagagttgctgagcagcagcagcccagcttcaccctcaaacggagatgaccaaggtcgcttcatcatctgaaaagcatggatcaaacagcacaagtcaccatcccagatcagagtttcgctaggtcggttggtacacaagcagttcaggttgcttcagtaatatagatatatgtctattactaaatccaacttacaagaactataaagtttgcaattgtgtgcagttctatgtacgtgaaaagctctacatacacatgttcctatcaagatactttgttacacatcaatgtcagtgatataattgcttataaaagaaataaatagattatgattgtgttactgctaaaaaaaaaaaaaaaaaaaggccccta

SEQ ID NO: 423 - protein, 207 aa, Zea mays
MVQPKKKFVFRGVRQRHWGSWVSEIRHPLLKRRVWLGTFETAEEAARAYDEAAVLMSGRNAKTNFPIQRSSTGEPTPAAGRDARSNFSSGSSTTNLSQILSAKLRKCCKAPSPSLTCLRLDPEKSHIGVWQKRAGARADSNWVMTVELNKDAASTDAASQSTSATTAPPATPMDEEERIALQMIEELLSSSSPASPSNGDDQGRFII

SEQ ID NO: 424 - DNA, 891 bp, Zea mays
  CDS (1)..(891)
atggctgctactatagatctgtcaggggaggagctgatgagagcactcgagccttttatccgggatgcctctgctcacggatccagtccgctcctccacccgcaccagccacttagcccctcgtcgccgttctccttccaccaagccgtcgccgccgcctcctcctacggagggaactacccgttcgccgcggccgacgaggcgggccagctgagcccttcccagatgcagtacatccaggcccgcctccacctgcagcgtcgccaggcgcagacctccgtgctgggcccgcgtgcccagcccatgaaggcgtcggcgtccgcggcccccgccccggcgcggccgcagaagctgtaccgcggcgtgcggcagcggcactggggcaagtgggtggcggagatccggctcccgaagaaccgcacccggctgtggctcggcaccttcgacaccgccgaggaggcggcgctcgcctacgaccaggccgcctaccgcctgcgcggcgacacggcgcgcctcaacttccccgacaacgccgcctcccgcggcccgctccacgcctccgtcgacgccaagctccagagcctgtgccagagcatcgccgcgtccaagaagggcgccaagaagccggcctccgccgcagctgccgcgtcgtcgtccgcccccaccagcaactgctcctcgccgtcgtccgacgacgcgacctcgtcctgcctcgagtccgccaccgagtcctcgtgcccgtccccgtcgccgtccgcctcgccagggccgacggtgccggagatgcagcagctggacttcagcgaggcgccgtgggacgaggccgccggcttcgcgctcaccaagtacccgtcgtacgagatcgactgggactccctcctcgccaattaa

SEQ ID NO: 425 - protein, 296 aa, Zea mays
MAATIDLSGEELMRALEPFIRDASAHGSSPLLHPHQPLSPSSPFSFHQAVAAASSYGGNYPFAAADEAGQLSPSQMQYIQARLHLQRRQAQTSVLGPRAQPMKASASAAPAPARPQKLYRGVRQRHWGKWVAEIRLPKNRTRLWLGTFDTAEEAALAYDQAAYRLRGDTARLNFPDNAASRGPLHASVDAKLQSLCQSIAASKKGAKKPASAAAAASSSAPTSNCSSPSSDDATSSCLESATESSCPSPSPSASPGPTVPEMQQLDFSEAPWDEAAGFALTKYPSYEIDWDSLLAN

SEQ ID NO: 426 - DNA, 1002 bp, Zea mays
  CDS (70)..(687)
ccgagaccaacgaaagaggagccccctgcccgatgagtgcggccaaatcaagcgagacgtgacgtggggatgcagcagatggagtgggacatgagaggaggagggcacggtagcgctgtcggggacggtgggcctggtggacgcggccttactgtcggaggcggcgtcgctctcgctgtcgggggaggggaccagcagcgcgtggaggcgcactaccgcggcgtccggaagcggccgtggggtcggtacgcggccgagatccgcgacccctggaggaagacgcgcgtgtggctgggcacctacgacacgcccgtcgaggccgccatggcctacgaccgcgccgccgtcgcgctgcgcggctccaaggccaggaccaacttcaccgcgggccgcggcggcgcccgggccacgcccgtccaggcccgcccgctcccgcaccccgcgctggcgcccggccacttcagcgggctcgacgccacacactcgtcgccctggcacgtcgtctatctcccaccgcccaggttgcaccagcaggccctggcgccgccgatgcccctcgtggcagtggcaggcgacgtcgccacgtcgctgccgtccacggcgctggagctccggacggggcccaaggccctcccgttcgacctcaacgaaccgccgtcgttgctgttcggctcgctgtctccgtgaacgcacatggagacggagctctgtagtgtcaggtagggatcgtggaccattggacgcagtggtaggattgatcagtgagggtaatcggaaatggtggtcatgggtccggttgtatatatactagcactctagcagcacctatttaaggaaatcttgcctttctcgtcttcgttcgtgttcttgttcttccatctccgttcggtgtctcgtcggcgacgcactttttcctggttgttttgtttggtaaaaacaaaggaggcgcatactgttgccaggagctctttctccttttcgttgtaaaaaaaaaaaaaaaaa

SEQ ID NO: 427 - protein, 205 aa, Zea mays
MQQMEWDMRGGGHGSAVGDGGPGGRGLTVGGGVALAVGGGDQQRVEAHYRGVRKRPWGRYAAEIRDPWRKTRVWLGTYDTPVEAAMAYDRAAVALRGSKARTNFTAGRGGARATPVQARPLPHPALAPGHFSGLDATHSSPWHVVYLPPPRLHQQALAPPMPLVAVAGDVATSLPSTALELRTGPKALPFDLNEPPSLLFGSLSP

SEQ ID NO: 428 - DNA, 1143 bp, Zea mays
  CDS (41)..(970)
tttcgttagagtacaggttacagacaggcagagagcaaagatgtgtggtggtgcgatcctcgccgagctcatcccgaccacgccggcgcgccgcggcggcgcggcgtggcccgccggcaagtgcaagcggcggaaggcgaacgacttcgaggccgcgttccgggagttcgacgaggactccgaggaggaggaggaggacgacgagggggtggtggagagcaagcccgctttcgtcgtccgcgcctcgtccgcggcgacgcagcccagggcgcgccaggagcagcggagccggcgccgggcgcccgaccagcagtacaggggcgtccggcgccgcccgtggggcaagtgggccgccgagatccgcgaccccgtcaagggcgtccgcgtctggctcggcaccttcccttccgccgaggccgccgcgcgcgcctacgaccacgccgcgcgccacatccgcgggcccagggccaagctcaacttcccctcctcctcctccgcctccgctgccggggcccccgccagccgcaagcgcgcccgcgccgccgacgccgacgccgacgccgtcatcgacctcgaggaacaagagcagcgcccggccgcggcggccctgaagcacgaggccgccgagtgctccggatccggcgcgctcccggacttctcgtggcagggcgtgtcggcagcgtacgacgaggcctcggcgccgcgcccggccttcgacttcgaggcgcggccggagagcgccgcggacgaggcgtcgcccctggcctccgactccgagtcggacgcgctgttcgactcgctcctcttcggcgaccagttcgccttcttcgacgccggcgcgtacgagtcgctggacagcctgttcagcgccgacgccgtgcagagcaacgccgccgccgcggcggaccaggacatgccgctgtggagcttcgacgacggctgcctcgtcgaggacaacctctcgttttaagcttcggcgactgttgctgtgtcttgagttttgtaaattacgatctgtttttttttttgagtttctgcttatgtatatctgtatcgatggtgagctgaatgaaatcatccttctcaggaagtaaaacaaaaaaaaaaaaaaaaaaaaaaaaaaagcggggcgatgtctcgtaa

SEQ ID NO: 429 - protein, 309 aa, Zea mays
MCGGAILAELIPTTPARRGGAAWPAGKCKRRKANDFEAAFREFDEDSEEEEEDDEGVVESKPAFVVRASSAATQPRARQEQRSRRRAPDQQYRGVRRRPWGKWAAEIRDPVKGVRVWLGTFPSAEAAARAYDHAARHIRGPRAKLNFPSSSSASAAGAPASRKRARAADADADAVIDLEEQEQRPAAAALKHEAAECSGSGALPDFSWQGVSAAYDEASAPRPAFDFEARPESAADEASPLASDSESDALFDSLLFGDQFAFFDAGAYESLDSLFSADAVQSNAAAAADQDMPLWSFDDGCLVEDNLSF

SEQ ID NO: 430 - DNA, 1299 bp, Zea mays
  CDS (258)..(974)
ttgggtacctcgaggccggccgggctcctcagcccgttctcttttcccccaccctatcaacacaatttacccttcgtcttcccgcttccagcgcacccccatcttgagtctcgccgccgcaagcttgtgtaaggtgtaaccctaaccctaaaacacttaccttcgcctccagcaccacgcttccatggaggggcgcggaggctaagtatagccaacctctacaccatatccccatggattgagcggattcccaaggcatgggtacaaaccctcacctgcaagagctggccgcttcggcggtggcggcttctgaaccaccaccgcgggcgcgcgtggtgcggatcctagtgcacgatgctgacgccaccgattcgtcctccagcgaggatgaggcaccgccacttcttcctcggcggaggtcgaggggtggtagcagcagcctgagcgtgaggcgccgtgttatggaaccggctggggcaagctcggccgttcggttccgtggcgtccgtcgtaggccgtgggggcgctgggctgcggagatccgcgacccgcacaaccgccgcagactgtggctcggcaccttcgacaccgctgaggaggctgccaacgcctacgacgctgcgaacatccgcttccgcggtgccagcgccactaccaacttccctgcggcccgctactcgccccctccaaagccagcgaagcctatcatctcgctgactcctgaacccggaaaggtgatcaccttgccaccggtacctgtgaagccaaccttccctgttcaggtgaaggaagtgggtgggagctggggcggcctggtcaagggagctaggtcggaggtcaaggcgtttgcaccgaagccagtatggaagatgatccccagggtgcaccagaagtttccgggttgtgccgatggctctggcctgcgtgccgtccatgctgcctccatctacgtggaggaggttggcggtggctgatggtccaagtatctgcaattactatcgctagaggttttattgtctatctccatggcatcattataacctggtactgtattattttggttagtgttaaactgttgatgtggaaacctatgactcttgctgtgttatgatcggtggtaatataatgtgtatatggtgacatttggtaatatgttcctgatctatgtgatgcaatgtgctgtgctttgattgtgggatcaaacctgtcatatagtagtacaatctagatcctttcacatgaacagtgatacctagatgtatttgatggttatttcagttgaattaaacaaaattgctc

SEQ ID NO: 431 - protein, 238 aa, Zea mays
MGTNPHLQELAASAVAASEPPPRARVVRILVHDADATDSSSSEDEAPPLLPRRRSRGGSSSLSVRRRVMEPAGASSAVRFRGVRRRPWGRWAAEIRDPHNRRRLWLGTFDTAEEAANAYDAANIRFRGASATTNFPAARYSPPPKPAKPIISLTPEPGKVITLPPVPVKPTFPVQVKEVGGSWGGLVKGARSEVKAFAPKPVWKMIPRVHQKFPGCADGSGLRAVHAASIYVEEVGGG

SEQ ID NO: 432 - DNA, 951 bp, Zea mays
  CDS (73)..(786)
cacgacacacccctcctgcccacaccacctcgctgaaccggaagacccgcacacacacgccacttgtagaccatggcgccccgggtggcggacaagtcgcctctaccgccggccaccggcctggggctgggcgttggcggaggagtcggaggcgtgggcatgggcccgcactacagaggcgtgaggaagcgtccatggggacgctacgccgccgagatccgcgaccctgccaagaaaagccgcgtgtggctcggcacgtacgacacggccgaggaggccgccaaggcgtacgattccgccgcccgcgagttccgaggcgccaaggccaagacgaacttcccgttcccctcccagtgctccgtcgcctccggtgctgccagtagcgccagtagcaacagcaccgtggattcgagcggtggcggtagcggctgtggcatccaggcgcctatgcaggccatgccgcttcctccggctctcgatctcgacctcttccatcgggcggccgccgtgaacgcagtctccaccggcatgcggtttccgttcaagggctatcctgtcgcctgcccgacgccacagcagtactttttctacgagcaggcggctgccgcggcatccggataccggatgctcaaggtcgctccaccggccgtgactgtggccgcggttgcgcagagcgactccgactcgtcgtctgtggttgatcactccccttcgcctcccgcggtgacggcaaacaaggtgggcttcgaactggatctgaactggcccccgccggcagagaactaggcaggccggagtttttggctgacgacttagtagcttccttttcccttttgccttcatcaggaatgttacttgtggttgttttggtcctgtatggctgtattcttgttctgtagactaagagatggggagtcttgtaaatattttttttccgtcgagacggaaatg

SEQ ID NO: 433 - protein, 237 aa, Zea mays
MAPRVADKSPLPPATGLGLGVGGGVGGVGMGPHYRGVRKRPWGRYAAEIRDPAKKSRVWLGTYDTAEEAAKAYDSAAREFRGAKAKTNFPFPSQCSVASGAASSASSNSTVDSSGGGSGCGIQAPMQAMPLPPALDLDLFHRAAAVNAVSTGMRFPFKGYPVACPTPQQYFFYEQAAAAASGYRMLKVAPPAVTVAAVAQSDSDSSSVVDHSPSPPAVTANKVGFELDLNWPPPAEN

SEQ ID NO: 434 - DNA, 1053 bp, Zea mays
  CDS (70)..(822)
ccgagaccaacgaaagaggagccccctgcccgatgagtgcggccaaatcaagcgagacgtgacgtggggatgcagcagatggagtgggacacgagaggaggaggagggcacggtggcgctgtcggggacggtgggccgagagtcggaggcctcactgtcggaggtgttgctgtcggggtaagcggaccagcagccgtggaggcgcactaccgcggcgtccggaagcggacgtggggccggtacgcggcggagatccgcgacccctggaggaagacgcgcgtgtggctgggcacctacgacacggccgaggacgccgcgcgggcctacgacgccgccgcgcgcgagtaccgcggcgccaaggccaagaccaacttcccttacccctcgtgcgtgcccctctccgcagccggttgccggagcagcaacagcagcaccgtcgagtccttcagcagcgacgcgcaggcgcccatgcaggccatgccgctcccgccgtcgctcgagctggacctgttccaccgcgcggcggccgcggccacgggcacgggcgctgccgccgtacgcttccctttcggcagcatccccgttacgcacccgtactacttcttcgggcaggccgcagccgcagccgcggaagcagggtgccgtgtgctcaagctggcgccggcggtcaccgtggcgcagagcgactccgactgttcgtcggtagtggatctgtcgccgtcgccaccggccgctgtgtcggcgaggaagcccgccgcgttcgatctcgacctgaactgctcaccgccgacggaggggaagcctagtcgtcgaagcttttaatgactgtctgtcttcttagttctttcttctcctttttctcgaggaaaattcggtactactaagctgagagacgctctcctccgacagacgacgtcgacgacgggcatttttgtaaatagtttttgcgccgggacctttttagtttatgatgaaagctgtattgtcaccgaagacaggtcctgccggcgttgttatggaccggattactatattatattatgcactactagt

SEQ ID NO: 435 - protein, 250 aa, Zea mays
MQQMEWDTRGGGGHGGAVGDGGPRVGGLTVGGVAVGVSGPAAVEAHYRGVRKRTWGRYAAEIRDPWRKTRVWLGTYDTAEDAARAYDAAAREYRGAKAKTNFPYPSCVPLSAAGCRSSNSSTVESFSSDAQAPMQAMPLPPSLELDLFHRAAAAATGTGAAAVRFPFGSIPVTHPYYFFGQAAAAAAEAGCRVLKLAPAVTVAQSDSDCSSVVDLSPSPPAAVSARKPAAFDLDLNCSPPTEGKPSRRSF

SEQ ID NO: 436 - DNA, 21 bp, Artificial sequence
  Primer
atgtgtggaggagctataatc

SEQ ID NO: 437 - DNA, 22 bp, Artificial sequence
  Primer
tcaaaagtctccttccagcatg

SEQ ID NO: 438 - protein, 58 aa, Unknown
  Consensus sequence
  MISC_FEATURE (4)..(4): xaa in position 4 is any amino acid
  MISC_FEATURE (6)..(6): xaa in position 6 is any amino acid
  MISC_FEATURE (11)..(12): xaa in position 11 to 12 is any amino acid
  MISC_FEATURE (20)..(24): xaa in position 20 to 24 is any amino acid
  MISC_FEATURE (26)..(26): xaa in position 26 is any amino acid
  MISC_FEATURE (31)..(33): xaa in position 31 to 33 is any amino acid
  MISC_FEATURE (36)..(36): xaa in position 36 is any amino acid
  MISC_FEATURE (39)..(39): xaa in position 39 is any amino acid
  MISC_FEATURE (43)..(44): xaa in position 43 to 44 is any amino acid
  MISC_FEATURE (46)..(48): xaa in position 46 to 48 is any amino acid
  MISC_FEATURE (51)..(52): xaa in position 51 to 52 is any amino acid
  MISC_FEATURE (54)..(55): xaa in position 54 to 55 is any amino acid
YRGXRXRPWGXXAAEIRDPXXXXXRXWLGTXXXAEXAAXAYDXXAXXXRGXXAXXNFP

SEQ ID NO: 439 - protein, 58 aa, Unknown
  Consensus sequence
  MISC_FEATURE (1)..(1): xaa in position 1 is Tyr or Phe
  MISC_FEATURE (2)..(2): xaa in position 2 is Arg, Trp or Lys
  MISC_FEATURE (4)..(4): xaa in position 4 is Val or Ile
  MISC_FEATURE (6)..(6): xaa in position 6 is any amino acid
  MISC_FEATURE (8)..(8): xaa in position 8 is Pro, His, Lys or Thr
  MISC_FEATURE (9)..(9): xaa in position 9 is Trp or Ser
  MISC_FEATURE (11)..(11): xaa in position 11 is Lys, Arg or Ser
  MISC_FEATURE (12)..(12): xaa in position 12 is Trp, Tyr or Phe
  MISC_FEATURE (13)..(13): xaa in position 13 is Ala, Val or Leu
  MISC_FEATURE (14)..(14): xaa in position 14 is Ala or Ser
  MISC_FEATURE (18)..(18): xaa in position 18 is Asp, Leu, His or Glu
  MISC_FEATURE (20)..(20): xaa in position 20 is any amino acid
  MISC_FEATURE (21)..(21): xaa in position 21 is Lys, Asn, Arg, Glu or Leu
  MISC_FEATURE (22)..(22): xaa in position 22 is any or no amino acid
  MISC_FEATURE (23)..(23): xaa in position 23 is Gly, Lys, Arg or Ala
  MISC_FEATURE (24)..(24): xaa in position 24 is any amino acid
  MISC_FEATURE (26)..(26): xaa in position 26 is Val, Leu, Ile, Glu or Ala
  MISC_FEATURE (30)..(30): xaa in position 30 is Thr or Ser
  MISC_FEATURE (31)..(31): xaa in position 31 is Phe, Tyr or His
  MISC_FEATURE (32)..(32): xaa in position 32 is any amino acid
  MISC_FEATURE (33)..(33): xaa in position 33 is Thr, Ser, Asn or Pro
  MISC_FEATURE (34)..(34): xaa in position 34 is Ala, Pro or Glu
  MISC_FEATURE (35)..(35): xaa in position 35 is Glu, Val, Ile or Lys
  MISC_FEATURE (36)..(36): xaa in position 36 is Glu, Asp, Ala or Lys
  MISC_FEATURE (38)..(38): xaa in position 38 is Ala or Val
  MISC_FEATURE (39)..(39): xaa in position 39 is any amino acid
  MISC_FEATURE (40)..(40): xaa in position 40 is Ala or Gly
  MISC_FEATURE (42)..(42): xaa in position 42 is Asp or Gly
  MISC_FEATURE (43)..(43): xaa in position 43 is any amino acid
  MISC_FEATURE (44)..(44): xaa in position 44 is Ala or Glu
  MISC_FEATURE (45)..(45): xaa in position 45 is Ala, Asn, Val or Ser
  MISC_FEATURE (46)..(47): xaa in position 46 to 47 is any amino acid
  MISC_FEATURE (48)..(48): xaa in position 48 is Ile, Leu, Phe, Met or Tyr
  MISC_FEATURE (49)..(49): xaa in position 49 is Arg, Ser or Cys
  MISC_FEATURE (51)..(52): xaa in position 51 to 52 is any amino acid
  MISC_FEATURE (53)..(53): xaa in position 53 is Ala, Ser or Pro
  MISC_FEATURE (54)..(54): xaa in position 54 is any amino acid
  MISC_FEATURE (55)..(55): xaa in position 55 is Val, Leu, Thr, Ser or Gly
  MISC_FEATURE (56)..(56): xaa in position 56 is Asn or Ile
  MISC_FEATURE (57)..(57): xaa in position 57 is Phe or Ser
  MISC_FEATURE (58)..(58): xaa in position 58 is Pro, Gln or Thr
XXGXRXRXXGXXXXEIRXPXXXXXRXWLGXXXXXXXAXXXYXXXXXXXXGXXXXXXXX

SEQ ID NO: 440 - DNA, 2148 bp, Arabidopsis thaliana
  CDS (1)..(2148)
atgccgcctctaaagaagaggaagagaggagttggaacgaccgtgaaatcaacgacggaggagactgcgacggcaacgaaggagactgcgccggcaacgaaggagactgcgccggcaacgaaggagactgcgccgacgataacgaaggagactgcgccgacgaaggagactgcgccggcaacgaaggagactgcgccgacgaggacggaggagccgtcgctgacagagcaagatccggagaatgttgaggaagaagagagtgaagaagaagagaaagaagaagaagagaaagaagaagaagaggaagaggaaggggaggaagaggaagaggaggaagaggaggaagaggagaaagaagaagaggagaatgttggcggagaagagtcctccgatgatagtactagaagcttggggaagagacctccgccgatgagaatatggatgaggagacatcaactgcagtggaaattccggcggctatgtaatatgaatgaatgtctgttgcaggagatcgacgaggaaacagaagcagtaccacccttgagtatgtatttcccgccctcggaatatgtgaagaaaatcaagctttcaactcggtgctatattcacgaattgttgactacattcgataagttggagccgccgatgagcaagtccgagaggttatggtttgagaaccatcctagtttccaacatatcttccacatgccaagagacccgaaccaccgacttatggggatgtggatgctccttcttcgcacggcgcgcattgaaaggaagaaagaagcgtggttcatcgtcaatggcgttccaatccgatatggaatattggaacacgcattgatatcggacttcaattgcaagaactataaacttggttacaaaaatacggggaatttggatttcaagaggaagcatttcaaggatactgttgtgaaacgcgaagacgtgagagagaagctcataggaatggtaccggagggtgaaagatcaaaagaaaggttgaggatgatggtcttgtatttcttaagcagcattatcatagcgcctatcaagaccggagataaggcacctcaagtggatgaatttttcctcaaggtgatgagtgatctcacgttctgtaggaattttcagtgggggaggtattctttcgattacatgttaggaaccatctcacacacggtgaatcattttaatggttcagtcaccaacaacgagaagtacatatggccggttccgggtttctgtcttccgatggagcttcttgcattcgaggcaatttcacagttgagggaaaaatttattgaggaaattgcagaagcagatccgggatgtcctaggatgtgcaaggtgaggttcaagaagaaccatttgaaaggctttcctcttgataccatttatgcagaattgggtacaactcaggtcattgattctatcgtcacacttggaattgaggagcaaaaactcatgaaagcaatcactgaagaagaagacgacgttgacgtggctgatatggtggttgaaagttgggagaagcgtcgtaaagagggccgtctaattaggtttgatgagctctaccagcaggatattcaagccctgcagatcatcgcaggtccaaagattccgggtgcggaggatattcccgcagtgcgtggacaagaactcccgagtttggtttctgtggttcagatgattgaaaacttggataagaagatggtagaccagatgaataaaattataataatgatttctgatttggatagaagagttgaatcgttggaagcattcaaggatgagcagaaagcaaaggaggaaaaggtacatattgataattgcgtaatactaagtaacactatgataactagaaatcaagatgagatgaaccaagaggaggctggtgattcgagagagaaggatcaagaggaggatgttgttcaagagaaagatggtgatcaagaggaggatgttgttcaagagaaagatggtgatcaagaggaggatggtgtctcgaaagagaaggaacaagagaaagagaaggacccgaaagagaaagagaaagagaaggacccgaaagagaaggatggaggtccttcaaaacccgtggaagcaaacgtcacgagaaggatcactcggagaaccaagaattga

SEQ ID NO: 441 - protein, 715 aa, Arabidopsis thaliana
MPPLKKRKRGVGTTVKSTTEETATATKETAPATKETAPATKETAPTITKETAPTKETAPATKETAPTRTEEPSLTEQDPENVEEEESEEEEKEEEEKEEEEEEEGEEEEEEEEEEEEKEEEENVGGEESSDDSTRSLGKRPPPMRIWMRRHQLQWKFRRLCNMNECLLQEIDEETEAVPPLSMYFPPSEYVKKIKLSTRCYIHELLTTFDKLEPPMSKSERLWFENHPSFQHIFHMPRDPNHRLMGMWMLLLRTARIERKKEAWFIVNGVPIRYGILEHALISDFNCKNYKLGYKNTGNLDFKRKHFKDTVVKREDVREKLIGMVPEGERSKERLRMMVLYFLSSIIIAPIKTGDKAPQVDEFFLKVMSDLTFCRNFQWGRYSFDYMLGTISHTVNHFNGSVTNNEKYIWPVPGFCLPMELLAFEAISQLREKFIEEIAEADPGCPRMCKVRFKKNHLKGFPLDTIYAELGTTQVIDSIVTLGIEEQKLMKAITEEEDDVDVADMVVESWEKRRKEGRLIRFDELYQQDIQALQIIAGPKIPGAEDIPAVRGQELPSLVSVVQMIENLDKKMVDQMNKIIIMISDLDRRVESLEAFKDEQKAKEEKVHIDNCVILSNTMITRNQDEMNQEEAGDSREKDQEEDVVQEKDGDQEEDVVQEKDGDQEEDGVSKEKEQEKEKDPKEKEKEKDPKEKDGGPSKPVEANVTRRITRRTKN

SEQ ID NO: 442 - protein, 370 aa, Unknown
  Consensus sequence
  MISC_FEATURE (1)..(370): xaa located in positions 2 to 10, 13 to 14, 16 to 18,; 20 to 28, 31 to 34, 39 to 57, 59 to 64, 67 to 68, 70 to 71,; 73, 77 to 78, 80 to 85, 87 to 93, 95 to 96, 98 to 116, 119,
  123 to 124, 126 to 128, 130 to 139, 141, 146 to 147, 150 to; 152, 158 to 161, 163 to 164, 167, 169 to 172, 175 to; 180, 182 to 183, 186 to 187, 189 to 191, 193 to 194, 196 to; 199, 201 to 207, 209, 211 to 213, 215 to 217, 219, 221 to
  226, 228 to 265, 267 to 269, 271 to 278, 280 to 281, 284 to; 340, 342 to 347, 349 to 351, 353 to 366 and 368 to 369;
  each xaa is any amino acid
FXXXXXXXXXDVXXKXXXMXXXXXXXXXRLXXXXLYFLXXXXXXXXXXXXXXXXXXXFXXXXXXDLXXCXXFXWGRXXFXXXXXXIXXXXXXXNXXVXXXXXXXXXXXXXXXXXXXLAXEAIXXLXXXFXXXXXXXXXXCXRMCKXXFKXXXMKGFPXXXXYXXLGXTXXXXSIXXXXXXEXXLLXXIXXXEXXVXXXXDXXXXXXXKXRXXXEXXXIXFXXXXXXDXXXXXXXXXXXXXXXXXXXXXXXXXXXXXXXXXXXXXXPXXXGXXXXXXXXLXXVVXXXXXXXXXXXXXXXXXXXXXXXXXXXXXXXXXXXXXXXXXXXXXXXXXXXXXXXXXDXXXXXXEXXXDXXXXXXXXXXXXXXEXXV

1. A process for the production of methionine, which comprises the following steps:
a) reducing or deleting the biological activity of a protein as depicted in SEQ ID NO: 2, SEQ ID NO: 8, SEQ ID NO: 20, SEQ ID NO: 65, SEQ ID NO: 152, SEQ ID NO: 229 or SEQ ID NO: 283 in a non-human organism, and
b) growing the organism under conditions which permit the production of methionine in said organism.

2. The process as claimed in claim 1, wherein the methionine synthesized by the organism is recovered.

3. The process as claimed in claim 1, wherein the reduction or deletion of the biological activity of the protein is achieved by reducing or deleting the expression of at least one nucleic acid molecule, wherein the nucleic acid molecule is selected from the group consisting of:
a) a nucleic acid molecule encoding the polypeptide shown in SEQ ID NO: 2, SEQ ID NO: 4, SEQ ID NO: 6, SEQ ID NO: 8, SEQ ID NO: 10, SEQ ID NO: 12, SEQ ID NO: 14, SEQ ID NO: 16, SEQ ID NO: 20, SEQ ID NO: 22, SEQ ID NO: 24, SEQ ID NO: 26, SEQ ID NO: 28, SEQ ID NO. 30, SEQ ID NO: 32; SEQ ID NO: 65, SEQ ID NO: 67, SEQ ID NO: 69, SEQ ID NO: 71, SEQ ID NO: 73, SEQ ID NO: 75, SEQ ID NO: 77, SEQ ID NO: 79, SEQ ID NO: 81, SEQ ID NO: 83, SEQ ID NO: 85, SEQ ID NO: 87, SEQ ID NO: 89, SEQ ID NO: 91, SEQ ID NO: 93, SEQ ID NO: 95, SEQ ID NO: 97, SEQ ID NO: 99, SEQ ID NO: 101, SEQ ID NO: 103, SEQ ID NO: 105, SEQ ID NO: 107, SEQ ID NO: 109, SEQ ID NO: 111, SEQ ID NO: 113, SEQ ID NO: 115, SEQ ID NO: 117, SEQ ID NO: 119, SEQ ID NO: 121, SEQ ID NO: 123, SEQ ID NO: 125, SEQ ID NO: 127, SEQ ID NO: 129, SEQ ID NO: 131, SEQ ID NO: 133, SEQ ID NO: 135, SEQ ID NO: 137, SEQ ID NO: 139, SEQ ID NO: 141, SEQ ID NO: 143, SEQ ID NO: 152, SEQ ID NO: 154, SEQ ID NO: 156, SEQ ID NO: 158, SEQ ID NO: 160, SEQ ID NO: 162, SEQ ID NO: 164, SEQ ID NO: 166, SEQ ID NO: 168, SEQ ID NO: 170, SEQ ID NO: 172, SEQ ID NO: 174, SEQ ID NO: 176, SEQ ID NO: 178, SEQ ID NO: 180, SEQ ID NO: 182, SEQ ID NO: 184, SEQ ID NO: 186, SEQ ID NO: 188, SEQ ID NO: 190, SEQ ID NO: 192, SEQ ID NO: 194, SEQ ID NO: 196, SEQ ID NO: 198, SEQ ID NO: 200, SEQ ID NO: 202, SEQ ID NO: 204, SEQ ID NO: 206, SEQ ID NO: 208, SEQ ID NO: 210, SEQ ID NO: 212, SEQ ID NO: 214, SEQ ID NO: 216, SEQ ID NO: 218, SEQ ID NO: 220, SEQ ID NO: 229, SEQ ID NO:231, SEQ ID NO:233, SEQ ID NO: 235, SEQ ID NO: 237, SEQ ID NO: 239, SEQ ID NO: 241, SEQ ID NO: 243, SEQ ID NO: 250, SEQ ID NO: 252, SEQ ID NO: 254, SEQ ID NO: 256, SEQ ID NO: 258, SEQ ID NO: 260, SEQ ID NO: 262, SEQ ID NO: 264, SEQ ID NO: 266, SEQ ID NO: 268, SEQ ID NO: 270, SEQ ID NO: 272, SEQ ID NO: 283, SEQ ID NO: 285, SEQ ID NO: 287, SEQ ID NO: 289, SEQ ID NO: 291, SEQ ID NO: 293, SEQ ID NO: 295, SEQ ID NO: 297, SEQ ID NO: 299, SEQ ID NO: 301, SEQ ID NO: 303, SEQ ID NO: 305, SEQ ID NO: 307, SEQ ID NO: 309, SEQ ID NO: 311, SEQ ID NO: 313, SEQ ID NO: 315, SEQ ID NO: 317, SEQ ID NO: 319, SEQ ID NO: 321, SEQ ID NO: 323, SEQ ID NO: 325, SEQ ID NO: 327, SEQ ID NO: 329, SEQ ID NO: 331, SEQ ID NO: 333, SEQ ID NO: 335, SEQ ID NO: 337, SEQ ID NO: 339, SEQ ID NO: 341, SEQ ID NO: 343, SEQ ID NO: 345, SEQ ID NO: 347, SEQ ID NO: 349, SEQ ID NO: 351, SEQ ID NO: 353, SEQ ID NO: 355, SEQ ID NO: 357, SEQ ID NO: 359, SEQ ID NO: 361, SEQ ID NO: 363, SEQ ID NO: 365, SEQ ID NO: 367, SEQ ID NO: 369, SEQ ID NO: 371, SEQ ID NO: 373, SEQ ID NO: 375, SEQ ID NO: 377, SEQ ID NO: 379, SEQ ID NO: 381, SEQ ID NO: 383, SEQ ID NO: 385, SEQ ID NO: 387, SEQ ID NO: 389, SEQ ID NO: 391, SEQ ID NO: 393, SEQ ID NO: 395, SEQ ID NO: 397, SEQ ID NO: 399, SEQ ID NO: 401, SEQ ID NO: 403, SEQ ID NO: 405, SEQ ID NO: 407, SEQ ID NO: 409, SEQ ID NO: 411, SEQ ID NO: 413, SEQ ID NO: 415, SEQ ID NO: 417, SEQ ID NO: 419, SEQ ID NO: 421, SEQ ID NO: 423, SEQ ID NO: 425, SEQ ID NO: 427, SEQ ID NO: 429, SEQ ID NO: 431, SEQ ID NO: 433, SEQ ID NO: 435 or SEQ ID NO: 441;
b) a nucleic acid molecule comprising the nucleic acid molecule shown in SEQ ID NO: 1, SEQ ID NO: 3, SEQ ID NO: 5, SEQ ID NO: 7, SEQ ID NO: 9, SEQ ID NO: 11, SEQ ID NO: 13, SEQ ID NO: 15, SEQ ID NO: 19, SEQ ID NO: 21, SEQ ID NO: 23, SEQ ID NO: 25, SEQ ID NO: 27, SEQ ID NO: 29, SEQ ID NO: 31; SEQ ID NO: 64, SEQ ID NO: 66, SEQ ID NO: 68, SEQ ID NO: 70, SEQ ID NO: 72, SEQ ID NO: 74, SEQ ID NO: 76, SEQ ID NO: 78, SEQ ID NO: 80, SEQ ID NO: 82, SEQ ID NO: 84, SEQ ID NO: 86, SEQ ID NO: 88, SEQ ID NO: 90, SEQ ID NO: 92, SEQ ID NO: 94, SEQ ID NO: 96, SEQ ID NO: 98, SEQ ID NO: 100, SEQ ID NO: 102, SEQ ID NO: 104, SEQ ID NO: 106, SEQ ID NO: 108, SEQ ID NO: 110, SEQ ID NO: 112, SEQ ID NO: 114, SEQ ID NO: 116, SEQ ID NO: 118, SEQ ID NO: 120, SEQ ID NO: 122, SEQ ID NO: 124, SEQ ID NO: 126, SEQ ID NO: 128, SEQ ID NO: 130, SEQ ID NO: 132, SEQ ID NO: 134, SEQ ID NO: 136, SEQ ID NO: 138, SEQ ID NO: 140, SEQ ID NO: , SEQ ID NO: 142, SEQ ID NO: 151, SEQ ID NO: 153, SEQ ID NO: 155, SEQ ID NO: 157, SEQ ID NO: 159, SEQ ID NO: 161, SEQ ID NO: 163, SEQ ID NO: 165, SEQ ID NO: 167, SEQ ID NO: 169, SEQ ID NO: 171, SEQ ID NO: 173, SEQ ID NO: 175, SEQ ID NO: 177, SEQ ID NO: 179, SEQ ID NO: 181, SEQ ID NO: 183, SEQ ID NO: 185, SEQ ID NO: 187, SEQ ID NO: 189, SEQ ID NO: 191, SEQ ID NO: 193, SEQ ID NO: 195, SEQ ID NO: 197, SEQ ID NO: 199, SEQ ID NO: 201, SEQ ID NO: 203, SEQ ID NO: 205, SEQ ID NO: 207, SEQ ID NO: 209, SEQ ID NO: 211, SEQ ID NO: 213, SEQ ID NO: 215, SEQ ID NO: 217, SEQ ID NO: 219, SEQ ID NO: 228, SEQ ID NO: 230, SEQ ID NO: 232, SEQ ID NO: 234, SEQ ID NO: 236, SEQ ID NO: 238, SEQ ID NO: 240, SEQ ID NO: 242, SEQ ID NO: 249, SEQ ID NO: 251, SEQ ID NO: 253, SEQ ID NO: 255, SEQ ID NO: 257, SEQ ID NO: 259, SEQ ID NO: 261, SEQ ID NO: 263, SEQ ID NO: 265, SEQ ID NO: 267, SEQ ID NO: 269, SEQ ID NO: 271, SEQ ID NO: 282, SEQ ID NO: 284, SEQ ID NO: 286, SEQ ID NO: 288, SEQ ID NO: 290, SEQ ID NO: 292, SEQ ID NO: 294, SEQ ID NO: 296, SEQ ID NO: 298, SEQ ID NO: 300, SEQ ID NO: 302, SEQ ID NO: 304, SEQ ID NO: 306, SEQ ID NO: 308, SEQ ID NO: 310, SEQ ID NO: 312, SEQ ID NO: 314, SEQ ID NO: 316, SEQ ID NO: 318, SEQ ID NO: 320, SEQ ID NO: 322, SEQ ID NO: 324, SEQ ID NO: 326, SEQ ID NO: 328, SEQ ID NO: 330, SEQ ID NO: 332, SEQ ID NO: 334, SEQ ID NO: 336, SEQ ID NO: 338, SEQ ID NO: 340, SEQ ID NO: 342, SEQ ID NO: 344, SEQ ID NO: 346, SEQ ID NO: 348, SEQ ID NO: 350, SEQ ID NO: 352, SEQ ID NO: 354, SEQ ID NO: 356, SEQ ID NO: 358, SEQ ID NO: 360, SEQ ID NO: 362, SEQ ID NO: 364, SEQ ID NO: 366, SEQ ID NO: 368, SEQ ID NO: 370, SEQ ID NO: 372, SEQ ID NO: 374, SEQ ID NO: 376, SEQ ID NO: 378, SEQ ID NO: 380, SEQ ID NO: 382, SEQ ID NO: 384, SEQ ID NO: 386, SEQ ID NO: 388, SEQ ID NO: 390, SEQ ID NO: 392, SEQ ID NO: 394, SEQ ID NO: 396, SEQ ID NO: 398, SEQ ID NO: 400, SEQ ID NO: 402, SEQ ID NO: 404, SEQ ID NO: 406, SEQ ID NO: 408, SEQ ID NO: 410, SEQ ID NO: 412, SEQ ID NO: 414, SEQ ID NO: 416, SEQ ID NO: 418, SEQ ID NO: 420, SEQ ID NO: 422, SEQ ID NO: 424, SEQ ID NO: 426, SEQ ID NO: 428, SEQ ID NO: 430, SEQ ID NO: 432, SEQ ID NO: 434 or SEQ ID NO: 440;
c) a nucleic acid molecule comprising a nucleic acid sequence, which, as a result of the degeneracy of the genetic code, can be derived from the polypeptide sequence depicted in SEQ ID NO: 2, SEQ ID NO: 4, SEQ ID NO: 6, SEQ ID NO: 8, SEQ ID NO: 10, SEQ ID NO: 12, SEQ ID NO: 14, SEQ ID NO: 16, SEQ ID NO: 20, SEQ ID NO: 22, SEQ ID NO: 24, SEQ ID NO: 26, SEQ ID NO: 28, SEQ ID NO. 30, SEQ ID NO: 32; SEQ ID NO: 65, SEQ ID NO: 67, SEQ ID NO: 69, SEQ ID NO: 71, SEQ ID NO: 73, SEQ ID NO: 75, SEQ ID NO: 77, SEQ ID NO: 79, SEQ ID NO: 81, SEQ ID NO: 83, SEQ ID NO: 85, SEQ ID NO: 87, SEQ ID NO: 89, SEQ ID NO: 91, SEQ ID NO: 93, SEQ ID NO: 95, SEQ ID NO: 97, SEQ ID NO: 99, SEQ ID NO: 101, SEQ ID NO: 103, SEQ ID NO: 105, SEQ ID NO: 107, SEQ ID NO: 109, SEQ ID NO: 111, SEQ ID NO: 113, SEQ ID NO: 115, SEQ ID NO: 117, SEQ ID NO: 119, SEQ ID NO: 121, SEQ ID NO: 123, SEQ ID NO: 125, SEQ ID NO: 127, SEQ ID NO: 129, SEQ ID NO: 131, SEQ ID NO: 133, SEQ ID NO: 135, SEQ ID NO: 137, SEQ ID NO: 139, SEQ ID NO: 141, SEQ ID NO: 143, SEQ ID NO: 152, SEQ ID NO: 154, SEQ ID NO: 156, SEQ ID NO: 158, SEQ ID NO: 160, SEQ ID NO: 162, SEQ ID NO: 164, SEQ ID NO: 166, SEQ ID NO: 168, SEQ ID NO: 170, SEQ ID NO: 172, SEQ ID NO: 174, SEQ ID NO: 176, SEQ ID NO: 178, SEQ ID NO: 180, SEQ ID NO: 182, SEQ ID NO: 184, SEQ ID NO: 186, SEQ ID NO: 188, SEQ ID NO: 190, SEQ ID NO: 192, SEQ ID NO: 194, SEQ ID NO: 196, SEQ ID NO: 198, SEQ ID NO: 200, SEQ ID NO: 202, SEQ ID NO: 204, SEQ ID NO: 206, SEQ ID NO: 208, SEQ ID NO: 210, SEQ ID NO: 212, SEQ ID NO: 214, SEQ ID NO: 216, SEQ ID NO: 218, SEQ ID NO: 220, SEQ ID NO: 229, SEQ ID NO:231, SEQ ID NO:233, SEQ ID NO: 235, SEQ ID NO: 237, SEQ ID NO: 239, SEQ ID NO: 241, SEQ ID NO: 243, SEQ ID NO: 250, SEQ ID NO: 252, SEQ ID NO: 254, SEQ ID NO: 256, SEQ ID NO: 258, SEQ ID NO: 260, SEQ ID NO: 262, SEQ ID NO: 264, SEQ ID NO: 266, SEQ ID NO: 268, SEQ ID NO: 270, SEQ ID NO: 272, SEQ ID NO: 283, SEQ ID NO: 285, SEQ ID NO: 287, SEQ ID NO: 289, SEQ ID NO: 291, SEQ ID NO: 293, SEQ ID NO: 295, SEQ ID NO: 297, SEQ ID NO: 299, SEQ ID NO: 301, SEQ ID NO: 303, SEQ ID NO: 305, SEQ ID NO: 307, SEQ ID NO: 309, SEQ ID NO: 311, SEQ ID NO: 313, SEQ ID NO: 315, SEQ ID NO: 317, SEQ ID NO: 319, SEQ ID NO: 321, SEQ ID NO: 323, SEQ ID NO: 325, SEQ ID NO: 327, SEQ ID NO: 329, SEQ ID NO: 331, SEQ ID NO: 333, SEQ ID NO: 335, SEQ ID NO: 337, SEQ ID NO: 339, SEQ ID NO: 341, SEQ ID NO: 343, SEQ ID NO: 345, SEQ ID NO: 347, SEQ ID NO: 349, SEQ ID NO: 351, SEQ ID NO: 353, SEQ ID NO: 355, SEQ ID NO: 357, SEQ ID NO: 359, SEQ ID NO: 361, SEQ ID NO: 363, SEQ ID NO: 365, SEQ ID NO: 367, SEQ ID NO: 369, SEQ ID NO: 371, SEQ ID NO: 373, SEQ ID NO: 375, SEQ ID NO: 377, SEQ ID NO: 379, SEQ ID NO: 381, SEQ ID NO: 383, SEQ ID NO: 385, SEQ ID NO: 387, SEQ ID NO: 389, SEQ ID NO: 391, SEQ ID NO: 393, SEQ ID NO: 395, SEQ ID NO: 397, SEQ ID NO: 399, SEQ ID NO: 401, SEQ ID NO: 403, SEQ ID NO: 405, SEQ ID NO: 407, SEQ ID NO: 409, SEQ ID NO: 411, SEQ ID NO: 413, SEQ ID NO: 415, SEQ ID NO: 417, SEQ ID NO: 419, SEQ ID NO: 421, SEQ ID NO: 423, SEQ ID NO: 425, SEQ ID NO: 427, SEQ ID NO: 429, SEQ ID NO: 431, SEQ ID NO: 433, SEQ ID NO: 435 or SEQ ID NO: 441;
d) a nucleic acid molecule encoding a polypeptide having at least 50% identity with the amino acid sequence of the polypeptide encoded by the nucleic acid molecule of (a) to (c) and having the biological activity represented by the protein as depicted in SEQ ID NO: 2, SEQ ID NO: 4, SEQ ID NO: 6, SEQ ID NO: 8, SEQ ID NO: 10, SEQ ID NO: 12, SEQ ID NO: 14, SEQ ID NO: 16, SEQ ID NO: 20, SEQ ID NO: 22, SEQ ID NO: 24, SEQ ID NO: 26, SEQ ID NO: 28, SEQ ID NO. 30, SEQ ID NO: 32; SEQ ID NO: 65, SEQ ID NO: 67, SEQ ID NO: 69, SEQ ID NO: 71, SEQ ID NO: 73, SEQ ID NO: 75, SEQ ID NO: 77, SEQ ID NO: 79, SEQ ID NO: 81, SEQ ID NO: 83, SEQ ID NO: 85, SEQ ID NO: 87, SEQ ID NO: 89, SEQ ID NO: 91, SEQ ID NO: 93, SEQ ID NO: 95, SEQ ID NO: 97, SEQ ID NO: 99, SEQ ID NO: 101, SEQ ID NO: 103, SEQ ID NO: 105, SEQ ID NO: 107, SEQ ID NO: 109, SEQ ID NO: 111, SEQ ID NO: 113, SEQ ID NO: 115, SEQ ID NO: 117, SEQ ID NO: 119, SEQ ID NO: 121, SEQ ID NO: 123, SEQ ID NO: 125, SEQ ID NO: 127, SEQ ID NO: 129, SEQ ID NO: 131, SEQ ID NO: 133, SEQ ID NO: 135, SEQ ID NO: 137, SEQ ID NO: 139, SEQ ID NO: 141, SEQ ID NO: 143, SEQ ID NO: 152, SEQ ID NO: 154, SEQ ID NO: 156, SEQ ID NO: 158, SEQ ID NO: 160, SEQ ID NO: 162, SEQ ID NO: 164, SEQ ID NO: 166, SEQ ID NO: 168, SEQ ID NO: 170, SEQ ID NO: 172, SEQ ID NO: 174, SEQ ID NO: 176, SEQ ID NO: 178, SEQ ID NO: 180, SEQ ID NO: 182, SEQ ID NO: 184, SEQ ID NO: 186, SEQ ID NO: 188, SEQ ID NO: 190, SEQ ID NO: 192, SEQ ID NO: 194, SEQ ID NO: 196, SEQ ID NO: 198, SEQ ID NO: 200, SEQ ID NO: 202, SEQ ID NO: 204, SEQ ID NO: 206, SEQ ID NO: 208, SEQ ID NO: 210, SEQ ID NO: 212, SEQ ID NO: 214, SEQ ID NO: 216, SEQ ID NO: 218, SEQ ID NO: 220, SEQ ID NO: 229, SEQ ID NO:231, SEQ ID NO:233, SEQ ID NO: 235, SEQ ID NO: 237, SEQ ID NO: 239, SEQ ID NO: 241, SEQ ID NO: 243, SEQ ID NO: 250, SEQ ID NO: 252, SEQ ID NO: 254, SEQ ID NO: 256, SEQ ID NO: 258, SEQ ID NO: 260, SEQ ID NO: 262, SEQ ID NO: 264, SEQ ID NO: 266, SEQ ID NO: 268, SEQ ID NO: 270, SEQ ID NO: 272, SEQ ID NO: 283, SEQ ID NO: 285, SEQ ID NO: 287, SEQ ID NO: 289, SEQ ID NO: 291, SEQ ID NO: 293, SEQ ID NO: 295, SEQ ID NO: 297, SEQ ID NO: 299, SEQ ID NO: 301, SEQ ID NO: 303, SEQ ID NO: 305, SEQ ID NO: 307, SEQ ID NO: 309, SEQ ID NO: 311, SEQ ID NO: 313, SEQ ID NO: 315, SEQ ID NO: 317, SEQ ID NO: 319, SEQ ID NO: 321, SEQ ID NO: 323, SEQ ID NO: 325, SEQ ID NO: 327, SEQ ID NO: 329, SEQ ID NO: 331, SEQ ID NO: 333, SEQ ID NO: 335, SEQ ID NO: 337, SEQ ID NO: 339, SEQ ID NO: 341, SEQ ID NO: 343, SEQ ID NO: 345, SEQ ID NO: 347, SEQ ID NO: 349, SEQ ID NO: 351, SEQ ID NO: 353, SEQ ID NO: 355, SEQ ID NO: 357, SEQ ID NO: 359, SEQ ID NO: 361, SEQ ID NO: 363, SEQ ID NO: 365, SEQ ID NO: 367, SEQ ID NO: 369, SEQ ID NO: 371, SEQ ID NO: 373, SEQ ID NO: 375, SEQ ID NO: 377, SEQ ID NO: 379, SEQ ID NO: 381, SEQ ID NO: 383, SEQ ID NO: 385, SEQ ID NO: 387, SEQ ID NO: 389, SEQ ID NO: 391, SEQ ID NO: 393, SEQ ID NO: 395, SEQ ID NO: 397, SEQ ID NO: 399, SEQ ID NO: 401, SEQ ID NO: 403, SEQ ID NO: 405, SEQ ID NO: 407, SEQ ID NO: 409, SEQ ID NO: 411, SEQ ID NO: 413, SEQ ID NO: 415, SEQ ID NO: 417, SEQ ID NO: 419, SEQ ID NO: 421, SEQ ID NO: 423, SEQ ID NO: 425, SEQ ID NO: 427, SEQ ID NO: 429, SEQ ID NO: 431, SEQ ID NO: 433, SEQ ID NO: 435 or SEQ ID NO: 441;
e) a nucleic acid molecule encoding a polypeptide which is isolated with the aid of monoclonal or polyclonal antibodies against the polypeptide encoded by one of the nucleic acid molecules of (a) to (d) and having the biological activity of the protein as depicted in SEQ ID NO: 2, SEQ ID NO: 4, SEQ ID NO: 6, SEQ ID NO: 8, SEQ ID NO: 10, SEQ ID NO: 12, SEQ ID NO: 14, SEQ ID NO: 16, SEQ ID NO: 20, SEQ ID NO: 22, SEQ ID NO: 24, SEQ ID NO: 26, SEQ ID NO: 28, SEQ ID NO. 30, SEQ ID NO: 32; SEQ ID NO: 65, SEQ ID NO: 67, SEQ ID NO: 69, SEQ ID NO: 71, SEQ ID NO: 73, SEQ ID NO: 75, SEQ ID NO: 77, SEQ ID NO: 79, SEQ ID NO: 81, SEQ ID NO: 83, SEQ ID NO: 85, SEQ ID NO: 87, SEQ ID NO: 89, SEQ ID NO: 91, SEQ ID NO: 93, SEQ ID NO: 95, SEQ ID NO: 97, SEQ ID NO: 99, SEQ ID NO: 101, SEQ ID NO: 103, SEQ ID NO: 105, SEQ ID NO: 107, SEQ ID NO: 109, SEQ ID NO: 111, SEQ ID NO: 113, SEQ ID NO: 115, SEQ ID NO: 117, SEQ ID NO: 119, SEQ ID NO: 121, SEQ ID NO: 123, SEQ ID NO: 125, SEQ ID NO: 127, SEQ ID NO: 129, SEQ ID NO: 131, SEQ ID NO: 133, SEQ ID NO: 135, SEQ ID NO: 137, SEQ ID NO: 139, SEQ ID NO: 141, SEQ ID NO: 143, SEQ ID NO: 152, SEQ ID NO: 154, SEQ ID NO: 156, SEQ ID NO: 158, SEQ ID NO: 160, SEQ ID NO: 162, SEQ ID NO: 164, SEQ ID NO: 166, SEQ ID NO: 168, SEQ ID NO: 170, SEQ ID NO: 172, SEQ ID NO: 174, SEQ ID NO: 176, SEQ ID NO: 178, SEQ ID NO: 180, SEQ ID NO: 182, SEQ ID NO: 184, SEQ ID NO: 186, SEQ ID NO: 188, SEQ ID NO: 190, SEQ ID NO: 192, SEQ ID NO: 194, SEQ ID NO: 196, SEQ ID NO: 198, SEQ ID NO: 200, SEQ ID NO: 202, SEQ ID NO: 204, SEQ ID NO: 206, SEQ ID NO: 208, SEQ ID NO: 210, SEQ ID NO: 212, SEQ ID NO: 214, SEQ ID NO: 216, SEQ ID NO: 218, SEQ ID NO: 220, SEQ ID NO: 229, SEQ ID NO:231, SEQ ID NO:233, SEQ ID NO: 235, SEQ ID NO: 237, SEQ ID NO: 239, SEQ ID NO: 241, SEQ ID NO: 243, SEQ ID NO: 250, SEQ ID NO: 252, SEQ ID NO: 254, SEQ ID NO: 256, SEQ ID NO: 258, SEQ ID NO: 260, SEQ ID NO: 262, SEQ ID NO: 264, SEQ ID NO: 266, SEQ ID NO: 268, SEQ ID NO: 270, SEQ ID NO: 272, SEQ ID NO: 283, SEQ ID NO: 285, SEQ ID NO: 287, SEQ ID NO: 289, SEQ ID NO: 291, SEQ ID NO: 293, SEQ ID NO: 295, SEQ ID NO: 297, SEQ ID NO: 299, SEQ ID NO: 301, SEQ ID NO: 303, SEQ ID NO: 305, SEQ ID NO: 307, SEQ ID NO: 309, SEQ ID NO: 311, SEQ ID NO: 313, SEQ ID NO: 315, SEQ ID NO: 317, SEQ ID NO: 319, SEQ ID NO: 321, SEQ ID NO: 323, SEQ ID NO: 325, SEQ ID NO: 327, SEQ ID NO: 329, SEQ ID NO: 331, SEQ ID NO: 333, SEQ ID NO: 335, SEQ ID NO: 337, SEQ ID NO: 339, SEQ ID NO: 341, SEQ ID NO: 343, SEQ ID NO: 345, SEQ ID NO: 347, SEQ ID NO: 349, SEQ ID NO: 351, SEQ ID NO: 353, SEQ ID NO: 355, SEQ ID NO: 357, SEQ ID NO: 359, SEQ ID NO: 361, SEQ ID NO: 363, SEQ ID NO: 365, SEQ ID NO: 367, SEQ ID NO: 369, SEQ ID NO: 371, SEQ ID NO: 373, SEQ ID NO: 375, SEQ ID NO: 377, SEQ ID NO: 379, SEQ ID NO: 381, SEQ ID NO: 383, SEQ ID NO: 385, SEQ ID NO: 387, SEQ ID NO: 389, SEQ ID NO: 391, SEQ ID NO: 393, SEQ ID NO: 395, SEQ ID NO: 397, SEQ ID NO: 399, SEQ ID NO: 401, SEQ ID NO: 403, SEQ ID NO: 405, SEQ ID NO: 407, SEQ ID NO: 409, SEQ ID NO: 411, SEQ ID NO: 413, SEQ ID NO: 415, SEQ ID NO: 417, SEQ ID NO: 419, SEQ ID NO: 421, SEQ ID NO: 423, SEQ ID NO: 425, SEQ ID NO: 427, SEQ ID NO: 429, SEQ ID NO: 431, SEQ ID NO: 433, SEQ ID NO: 435 or SEQ ID NO: 441;
f) a nucleic acid molecule encoding a polypeptide comprising the consensus sequence as shown in SEQ ID NO: 33, SEQ ID NO: 34, SEQ ID NO: 146, SEQ ID NO: 147, SEQ ID NO: 148, SEQ ID NO: 149, SEQ ID NO: 150, SEQ ID NO: 223, SEQ ID NO: 224, SEQ ID NO: 225, SEQ ID NO: 226, SEQ ID NO: 227, SEQ ID NO: 246, SEQ ID NO: 247, SEQ ID NO: 248, SEQ ID NO: 273, SEQ ID NO: 274, SEQ ID NO: 275, SEQ ID NO: 276, SEQ ID NO: 277, SEQ ID NO: 278, SEQ ID NO: 279, SEQ ID NO: 280, SEQ ID NO: 281, SEQ ID NO: 438, SEQ ID NO: 439 or SEQ ID NO: 442 and having the biological activity of the protein as depicted in SEQ ID NO: 2, SEQ ID NO: 4, SEQ ID NO: 6, SEQ ID NO: 8, SEQ ID NO: 10, SEQ ID NO: 12, SEQ ID NO: 14, SEQ ID NO: 16, SEQ ID NO: 20, SEQ ID NO: 22, SEQ ID NO: 24, SEQ ID NO: 26, SEQ ID NO: 28, SEQ ID NO. 30, SEQ ID NO: 32; SEQ ID NO: 65, SEQ ID NO: 67, SEQ ID NO: 69, SEQ ID NO: 71, SEQ ID NO: 73, SEQ ID NO: 75, SEQ ID NO: 77, SEQ ID NO: 79, SEQ ID NO: 81, SEQ ID NO: 83, SEQ ID NO: 85, SEQ ID NO: 87, SEQ ID NO: 89, SEQ ID NO: 91, SEQ ID NO: 93, SEQ ID NO: 95, SEQ ID NO: 97, SEQ ID NO: 99, SEQ ID NO: 101, SEQ ID NO: 103, SEQ ID NO: 105, SEQ ID NO: 107, SEQ ID NO: 109, SEQ ID NO: 111, SEQ ID NO: 113, SEQ ID NO: 115, SEQ ID NO: 117, SEQ ID NO: 119, SEQ ID NO: 121, SEQ ID NO: 123, SEQ ID NO: 125, SEQ ID NO: 127, SEQ ID NO: 129, SEQ ID NO: 131, SEQ ID NO: 133, SEQ ID NO: 135, SEQ ID NO: 137, SEQ ID NO: 139, SEQ ID NO: 141, SEQ ID NO: 143, SEQ ID NO: 152, SEQ ID NO: 154, SEQ ID NO: 156, SEQ ID NO: 158, SEQ ID NO: 160, SEQ ID NO: 162, SEQ ID NO: 164, SEQ ID NO: 166, SEQ ID NO: 168, SEQ ID NO: 170, SEQ ID NO: 172, SEQ ID NO: 174, SEQ ID NO: 176, SEQ ID NO: 178, SEQ ID NO: 180, SEQ ID NO: 182, SEQ ID NO: 184, SEQ ID NO: 186, SEQ ID NO: 188, SEQ ID NO: 190, SEQ ID NO: 192, SEQ ID NO: 194, SEQ ID NO: 196, SEQ ID NO: 198, SEQ ID NO: 200, SEQ ID NO: 202, SEQ ID NO: 204, SEQ ID NO: 206, SEQ ID NO: 208, SEQ ID NO: 210, SEQ ID NO: 212, SEQ ID NO: 214, SEQ ID NO: 216, SEQ ID NO: 218, SEQ ID NO: 220, SEQ ID NO: 229, SEQ ID NO:231, SEQ ID NO:233, SEQ ID NO: 235, SEQ ID NO: 237, SEQ ID NO: 239, SEQ ID NO: 241, SEQ ID NO: 243, SEQ ID NO: 250, SEQ ID NO: 252, SEQ ID NO: 254, SEQ ID NO: 256, SEQ ID NO: 258, SEQ ID NO: 260, SEQ ID NO: 262, SEQ ID NO: 264, SEQ ID NO: 266, SEQ ID NO: 268, SEQ ID NO: 270, SEQ ID NO: 272, SEQ ID NO: 283, SEQ ID NO: 285, SEQ ID NO: 287, SEQ ID NO: 289, SEQ ID NO: 291, SEQ ID NO: 293, SEQ ID NO: 295, SEQ ID NO: 297, SEQ ID NO: 299, SEQ ID NO: 301, SEQ ID NO: 303, SEQ ID NO: 305, SEQ ID NO: 307, SEQ ID NO: 309, SEQ ID NO: 311, SEQ ID NO: 313, SEQ ID NO: 315, SEQ ID NO: 317, SEQ ID NO: 319, SEQ ID NO: 321, SEQ ID NO: 323, SEQ ID NO: 325, SEQ ID NO: 327, SEQ ID NO: 329, SEQ ID NO: 331, SEQ ID NO: 333, SEQ ID NO: 335, SEQ ID NO: 337, SEQ ID NO: 339, SEQ ID NO: 341, SEQ ID NO: 343, SEQ ID NO: 345, SEQ ID NO: 347, SEQ ID NO: 349, SEQ ID NO: 351, SEQ ID NO: 353, SEQ ID NO: 355, SEQ ID NO: 357, SEQ ID NO: 359, SEQ ID NO: 361, SEQ ID NO: 363, SEQ ID NO: 365, SEQ ID NO: 367, SEQ ID NO: 369, SEQ ID NO: 371, SEQ ID NO: 373, SEQ ID NO: 375, SEQ ID NO: 377, SEQ ID NO: 379, SEQ ID NO: 381, SEQ ID NO: 383, SEQ ID NO: 385, SEQ ID NO: 387, SEQ ID NO: 389, SEQ ID NO: 391, SEQ ID NO: 393, SEQ ID NO: 395, SEQ ID NO: 397, SEQ ID NO: 399, SEQ ID NO: 401, SEQ ID NO: 403, SEQ ID NO: 405, SEQ ID NO: 407, SEQ ID NO: 409, SEQ ID NO: 411, SEQ ID NO: 413, SEQ ID NO: 415, SEQ ID NO: 417, SEQ ID NO: 419, SEQ ID NO: 421, SEQ ID NO: 423, SEQ ID NO: 425, SEQ ID NO: 427, SEQ ID NO: 429, SEQ ID NO: 431, SEQ ID NO: 433, SEQ ID NO: 435 or SEQ ID NO: 441;
g) a nucleic acid molecule encoding a polypeptide having the biological activity of the protein as depicted in SEQ ID NO: 2, SEQ ID NO: 4, SEQ ID NO: 6, SEQ ID NO: 8, SEQ ID NO: 10, SEQ ID NO: 12, SEQ ID NO: 14, SEQ ID NO: 16, SEQ ID NO: 20, SEQ ID NO: 22, SEQ ID NO: 24, SEQ ID NO: 26, SEQ ID NO: 28, SEQ ID NO. 30, SEQ ID NO: 32; SEQ ID NO: 65, SEQ ID NO: 67, SEQ ID NO: 69, SEQ ID NO: 71, SEQ ID NO: 73, SEQ ID NO: 75, SEQ ID NO: 77, SEQ ID NO: 79, SEQ ID NO: 81, SEQ ID NO: 83, SEQ ID NO: 85, SEQ ID NO: 87, SEQ ID NO: 89, SEQ ID NO: 91, SEQ ID NO: 93, SEQ ID NO: 95, SEQ ID NO: 97, SEQ ID NO: 99, SEQ ID NO: 101, SEQ ID NO: 103, SEQ ID NO: 105, SEQ ID NO: 107, SEQ ID NO: 109, SEQ ID NO: 111, SEQ ID NO: 113, SEQ ID NO: 115, SEQ ID NO: 117, SEQ ID NO: 119, SEQ ID NO: 121, SEQ ID NO: 123, SEQ ID NO: 125, SEQ ID NO: 127, SEQ ID NO: 129, SEQ ID NO: 131, SEQ ID NO: 133, SEQ ID NO: 135, SEQ ID NO: 137, SEQ ID NO: 139, SEQ ID NO: 141, SEQ ID NO: 143, SEQ ID NO: 152, SEQ ID NO: 154, SEQ ID NO: 156, SEQ ID NO: 158, SEQ ID NO: 160, SEQ ID NO: 162, SEQ ID NO: 164, SEQ ID NO: 166, SEQ ID NO: 168, SEQ ID NO: 170, SEQ ID NO: 172, SEQ ID NO: 174, SEQ ID NO: 176, SEQ ID NO: 178, SEQ ID NO: 180, SEQ ID NO: 182, SEQ ID NO: 184, SEQ ID NO: 186, SEQ ID NO: 188, SEQ ID NO: 190, SEQ ID NO: 192, SEQ ID NO: 194, SEQ ID NO: 196, SEQ ID NO: 198, SEQ ID NO: 200, SEQ ID NO: 202, SEQ ID NO: 204, SEQ ID NO: 206, SEQ ID NO: 208, SEQ ID NO: 210, SEQ ID NO: 212, SEQ ID NO: 214, SEQ ID NO: 216, SEQ ID NO: 218, SEQ ID NO: 220, SEQ ID NO: 229, SEQ ID NO:231, SEQ ID NO:233, SEQ ID NO: 235, SEQ ID NO: 237, SEQ ID NO: 239, SEQ ID NO: 241, SEQ ID NO: 243, SEQ ID NO: 250, SEQ ID NO: 252, SEQ ID NO: 254, SEQ ID NO: 256, SEQ ID NO: 258, SEQ ID NO: 260, SEQ ID NO: 262, SEQ ID NO: 264, SEQ ID NO: 266, SEQ ID NO: 268, SEQ ID NO: 270, SEQ ID NO: 272, SEQ ID NO: 283, SEQ ID NO: 285, SEQ ID NO: 287, SEQ ID NO: 289, SEQ ID NO: 291, SEQ ID NO: 293, SEQ ID NO: 295, SEQ ID NO: 297, SEQ ID NO: 299, SEQ ID NO: 301, SEQ ID NO: 303, SEQ ID NO: 305, SEQ ID NO: 307, SEQ ID NO: 309, SEQ ID NO: 311, SEQ ID NO: 313, SEQ ID NO: 315, SEQ ID NO: 317, SEQ ID NO: 319, SEQ ID NO: 321, SEQ ID NO: 323, SEQ ID NO: 325, SEQ ID NO: 327, SEQ ID NO: 329, SEQ ID NO: 331, SEQ ID NO: 333, SEQ ID NO: 335, SEQ ID NO: 337, SEQ ID NO: 339, SEQ ID NO: 341, SEQ ID NO: 343, SEQ ID NO: 345, SEQ ID NO: 347, SEQ ID NO: 349, SEQ ID NO: 351, SEQ ID NO: 353, SEQ ID NO: 355, SEQ ID NO: 357, SEQ ID NO: 359, SEQ ID NO: 361, SEQ ID NO: 363, SEQ ID NO: 365, SEQ ID NO: 367, SEQ ID NO: 369, SEQ ID NO: 371, SEQ ID NO: 373, SEQ ID NO: 375, SEQ ID NO: 377, SEQ ID NO: 379, SEQ ID NO: 381, SEQ ID NO: 383, SEQ ID NO: 385, SEQ ID NO: 387, SEQ ID NO: 389, SEQ ID NO: 391, SEQ ID NO: 393, SEQ ID NO: 395, SEQ ID NO: 397, SEQ ID NO: 399, SEQ ID NO: 401, SEQ ID NO: 403, SEQ ID NO: 405, SEQ ID NO: 407, SEQ ID NO: 409, SEQ ID NO: 411, SEQ ID NO: 413, SEQ ID NO: 415, SEQ ID NO: 417, SEQ ID NO: 419, SEQ ID NO: 421, SEQ ID NO: 423, SEQ ID NO: 425, SEQ ID NO: 427, SEQ ID NO: 429, SEQ ID NO: 431, SEQ ID NO: 433, SEQ ID NO: 435 or SEQ ID NO: 441;
h) a nucleic acid molecule which is obtainable by screening a suitable nucleic acid library under stringent hybridisation conditions with a probe comprising one of the sequences of the nucleic acid molecule of (a) or (b) or with a fragment thereof having at least 15 nt, 20 nt, 30 nt, 50 nt, 100 nt, 200 nt or 500 nt of the nucleic acid molecule characterized in (a) to (c) and encoding a polypeptide having the biological activity of the protein as depicted in SEQ ID NO: 2, SEQ ID NO: 4, SEQ ID NO: 6, SEQ ID NO: 8, SEQ ID NO: 10, SEQ ID NO: 12, SEQ ID NO: 14, SEQ ID NO: 16, SEQ ID NO: 20, SEQ ID NO: 22, SEQ ID NO: 24, SEQ ID NO: 26, SEQ ID NO: 28, SEQ ID NO. 30, SEQ ID NO: 32; SEQ ID NO: 65, SEQ ID NO: 67, SEQ ID NO: 69, SEQ ID NO: 71, SEQ ID NO: 73, SEQ ID NO: 75, SEQ ID NO: 77, SEQ ID NO: 79, SEQ ID NO: 81, SEQ ID NO: 83, SEQ ID NO: 85, SEQ ID NO: 87, SEQ ID NO: 89, SEQ ID NO: 91, SEQ ID NO: 93, SEQ ID NO: 95, SEQ ID NO: 97, SEQ ID NO: 99, SEQ ID NO: 101, SEQ ID NO: 103, SEQ ID NO: 105, SEQ ID NO: 107, SEQ ID NO: 109, SEQ ID NO: 111, SEQ ID NO: 113, SEQ ID NO: 115, SEQ ID NO: 117, SEQ ID NO: 119, SEQ ID NO: 121, SEQ ID NO: 123, SEQ ID NO: 125, SEQ ID NO: 127, SEQ ID NO: 129, SEQ ID NO: 131, SEQ ID NO: 133, SEQ ID NO: 135, SEQ ID NO: 137, SEQ ID NO: 139, SEQ ID NO: 141, SEQ ID NO: 143, SEQ ID NO: 152, SEQ ID NO: 154, SEQ ID NO: 156, SEQ ID NO: 158, SEQ ID NO: 160, SEQ ID NO: 162, SEQ ID NO: 164, SEQ ID NO: 166, SEQ ID NO: 168, SEQ ID NO: 170, SEQ ID NO: 172, SEQ ID NO: 174, SEQ ID NO: 176, SEQ ID NO: 178, SEQ ID NO: 180, SEQ ID NO: 182, SEQ ID NO: 184, SEQ ID NO: 186, SEQ ID NO: 188, SEQ ID NO: 190, SEQ ID NO: 192, SEQ ID NO: 194, SEQ ID NO: 196, SEQ ID NO: 198, SEQ ID NO: 200, SEQ ID NO: 202, SEQ ID NO: 204, SEQ ID NO: 206, SEQ ID NO: 208, SEQ ID NO: 210, SEQ ID NO: 212, SEQ ID NO: 214, SEQ ID NO: 216, SEQ ID NO: 218, SEQ ID NO: 220, SEQ ID NO: 229, SEQ ID NO:231, SEQ ID NO:233, SEQ ID NO: 235, SEQ ID NO: 237, SEQ ID NO: 239, SEQ ID NO: 241, SEQ ID NO: 243, SEQ ID NO: 250, SEQ ID NO: 252, SEQ ID NO: 254, SEQ ID NO: 256, SEQ ID NO: 258, SEQ ID NO: 260, SEQ ID NO: 262, SEQ ID NO: 264, SEQ ID NO: 266, SEQ ID NO: 268, SEQ ID NO: 270, SEQ ID NO: 272, SEQ ID NO: 283, SEQ ID NO: 285, SEQ ID NO: 287, SEQ ID NO: 289, SEQ ID NO: 291, SEQ ID NO: 293, SEQ ID NO: 295, SEQ ID NO: 297, SEQ ID NO: 299, SEQ ID NO: 301, SEQ ID NO: 303, SEQ ID NO: 305, SEQ ID NO: 307, SEQ ID NO: 309, SEQ ID NO: 311, SEQ ID NO: 313, SEQ ID NO: 315, SEQ ID NO: 317, SEQ ID NO: 319, SEQ ID NO: 321, SEQ ID NO: 323, SEQ ID NO: 325, SEQ ID NO: 327, SEQ ID NO: 329, SEQ ID NO: 331, SEQ ID NO: 333, SEQ ID NO: 335, SEQ ID NO: 337, SEQ ID NO: 339, SEQ ID NO: 341, SEQ ID NO: 343, SEQ ID NO: 345, SEQ ID NO: 347, SEQ ID NO: 349, SEQ ID NO: 351, SEQ ID NO: 353, SEQ ID NO: 355, SEQ ID NO: 357, SEQ ID NO: 359, SEQ ID NO: 361, SEQ ID NO: 363, SEQ ID NO: 365, SEQ ID NO: 367, SEQ ID NO: 369, SEQ ID NO: 371, SEQ ID NO: 373, SEQ ID NO: 375, SEQ ID NO: 377, SEQ ID NO: 379, SEQ ID NO: 381, SEQ ID NO: 383, SEQ ID NO: 385, SEQ ID NO: 387, SEQ ID NO: 389, SEQ ID NO: 391, SEQ ID NO: 393, SEQ ID NO: 395, SEQ ID NO: 397, SEQ ID NO: 399, SEQ ID NO: 401, SEQ ID NO: 403, SEQ ID NO: 405, SEQ ID NO: 407, SEQ ID NO: 409, SEQ ID NO: 411, SEQ ID NO: 413, SEQ ID NO: 415, SEQ ID NO: 417, SEQ ID NO: 419, SEQ ID NO: 421, SEQ ID NO: 423, SEQ ID NO: 425, SEQ ID NO: 427, SEQ ID NO: 429, SEQ ID NO: 431, SEQ ID NO: 433, SEQ ID NO: 435 or SEQ ID NO: 441;
or which comprises a sequence which is complementary thereto.

4. The process of claim 1, whereby the reduction or deletion of the biological activity of the protein according to claim 1 is achieved by a process comprising a step selected from the group consisting of:
(a) introducing a nucleic acid molecule encoding a ribonucleic acid sequence, which are able to form double-stranded ribonucleic acid molecule, whereby the sense strand of said double-stranded ribonucleic acid molecule has a homology of at least 30% to a nucleic acid molecule conferring the expression of or encoding a protein having the biological activity of the protein according to claim 1 or comprising a fragment of at least 17, 18, 19, 20, 21, 22, 23, 24 or 25 base pairs of a nucleic acid molecule with a homology of at least 50% to a nucleic acid molecule conferring the expression of a protein having the biological activity of the protein according to claim 1;
(b) introducing an antisense nucleic acid molecule, whereby the antisense nucleic acid molecule has a homology of at least 30% to a nucleic acid molecule antisense to a nucleic acid molecule encoding a protein having the biological activity of the protein according to claim 1 or conferring the expression of a protein having the biological activity of the protein according to claim 1 or introducing an antisense nucleic acid molecule comprising a fragment of at least 15 base pairs of a nucleic acid molecule with a homology of at least 50% to an antisense nucleic acid molecule to a nucleic acid molecule conferring the expression of a protein having the biological activity of the protein according to claim 1;
(c) introducing a ribozyme which specifically cleaves a nucleic acid molecule conferring expression of a protein having the biological activity of the protein according to claim 1;
(d) introducing the antisense nucleic acid molecule characterized in (b) and the ribozyme characterized in (c);
(e) introducing a sense nucleic acid molecule conferring the expression of the nucleic acid molecule as depicted in SEQ ID NO: 1, SEQ ID NO: 3, SEQ ID NO: 5, SEQ ID NO: 7, SEQ ID NO: 9, SEQ ID NO: 11, SEQ ID NO: 13, SEQ ID NO: 15, SEQ ID NO: 19, SEQ ID NO: 21, SEQ ID NO: 23, SEQ ID NO: 25, SEQ ID NO: 27, SEQ ID NO: 29, SEQ ID NO: 31; SEQ ID NO: 64, SEQ ID NO: 66, SEQ ID NO: 68, SEQ ID NO: 70, SEQ ID NO: 72, SEQ ID NO: 74, SEQ ID NO: 76, SEQ ID NO: 78, SEQ ID NO: 80, SEQ ID NO: 82, SEQ ID NO: 84, SEQ ID NO: 86, SEQ ID NO: 88, SEQ ID NO: 90, SEQ ID NO: 92, SEQ ID NO: 94, SEQ ID NO: 96, SEQ ID NO: 98, SEQ ID NO: 100, SEQ ID NO: 102, SEQ ID NO: 104, SEQ ID NO: 106, SEQ ID NO: 108, SEQ ID NO: 110, SEQ ID NO: 112, SEQ ID NO: 114, SEQ ID NO: 116, SEQ ID NO: 118, SEQ ID NO: 120, SEQ ID NO: 122, SEQ ID NO: 124, SEQ ID NO: 126, SEQ ID NO: 128, SEQ ID NO: 130, SEQ ID NO: 132, SEQ ID NO: 134, SEQ ID NO: 136, SEQ ID NO: 138, SEQ ID NO: 140, SEQ ID NO: , SEQ ID NO: 142, SEQ ID NO: 151, SEQ ID NO: 153, SEQ ID NO: 155, SEQ ID NO: 157, SEQ ID NO: 159, SEQ ID NO: 161, SEQ ID NO: 163, SEQ ID NO: 165, SEQ ID NO: 167, SEQ ID NO: 169, SEQ ID NO: 171, SEQ ID NO: 173, SEQ ID NO: 175, SEQ ID NO: 177, SEQ ID NO: 179, SEQ ID NO: 181, SEQ ID NO: 183, SEQ ID NO: 185, SEQ ID NO: 187, SEQ ID NO: 189, SEQ ID NO: 191, SEQ ID NO: 193, SEQ ID NO: 195, SEQ ID NO: 197, SEQ ID NO: 199, SEQ ID NO: 201, SEQ ID NO: 203, SEQ ID NO: 205, SEQ ID NO: 207, SEQ ID NO: 209, SEQ ID NO: 211, SEQ ID NO: 213, SEQ ID NO: 215, SEQ ID NO: 217, SEQ ID NO: 219, SEQ ID NO: 228, SEQ ID NO: 230, SEQ ID NO: 232, SEQ ID NO: 234, SEQ ID NO: 236, SEQ ID NO: 238, SEQ ID NO: 240, SEQ ID NO: 242, SEQ ID NO: 249, SEQ ID NO: 251, SEQ ID NO: 253, SEQ ID NO: 255, SEQ ID NO: 257, SEQ ID NO: 259, SEQ ID NO: 261, SEQ ID NO: 263, SEQ ID NO: 265, SEQ ID NO: 267, SEQ ID NO: 269, SEQ ID NO: 271, SEQ ID NO: 282, SEQ ID NO: 284, SEQ ID NO: 286, SEQ ID NO: 288, SEQ ID NO: 290, SEQ ID NO: 292, SEQ ID NO: 294, SEQ ID NO: 296, SEQ ID NO: 298, SEQ ID NO: 300, SEQ ID NO: 302, SEQ ID NO: 304, SEQ ID NO: 306, SEQ ID NO: 308, SEQ ID NO: 310, SEQ ID NO: 312, SEQ ID NO: 314, SEQ ID NO: 316, SEQ ID NO: 318, SEQ ID NO: 320, SEQ ID NO: 322, SEQ ID NO: 324, SEQ ID NO: 326, SEQ ID NO: 328, SEQ ID NO: 330, SEQ ID NO: 332, SEQ ID NO: 334, SEQ ID NO: 336, SEQ ID NO: 338, SEQ ID NO: 340, SEQ ID NO: 342, SEQ ID NO: 344, SEQ ID NO: 346, SEQ ID NO: 348, SEQ ID NO: 350, SEQ ID NO: 352, SEQ ID NO: 354, SEQ ID NO: 356, SEQ ID NO: 358, SEQ ID NO: 360, SEQ ID NO: 362, SEQ ID NO: 364, SEQ ID NO: 366, SEQ ID NO: 368, SEQ ID NO: 370, SEQ ID NO: 372, SEQ ID NO: 374, SEQ ID NO: 376, SEQ ID NO: 378, SEQ ID NO: 380, SEQ ID NO: 382, SEQ ID NO: 384, SEQ ID NO: 386, SEQ ID NO: 388, SEQ ID NO: 390, SEQ ID NO: 392, SEQ ID NO: 394, SEQ ID NO: 396, SEQ ID NO: 398, SEQ ID NO: 400, SEQ ID NO: 402, SEQ ID NO: 404, SEQ ID NO: 406, SEQ ID NO: 408, SEQ ID NO: 410, SEQ ID NO: 412, SEQ ID NO: 414, SEQ ID NO: 416, SEQ ID NO: 418, SEQ ID NO: 420, SEQ ID NO: 422, SEQ ID NO: 424, SEQ ID NO: 426, SEQ ID NO: 428, SEQ ID NO: 430, SEQ ID NO: 432, SEQ ID NO: 434 or SEQ ID NO: 440 or a nucleic acid molecule encoding a polypeptide having at least 50% identity with the amino acid sequence of the polypeptide as depicted in SEQ ID NO: 2, SEQ ID NO: 4, SEQ ID NO: 6, SEQ ID NO: 8, SEQ ID NO: 10, SEQ ID NO: 12, SEQ ID NO: 14, SEQ ID NO: 16, SEQ ID NO: 20, SEQ ID NO: 22, SEQ ID NO: 24, SEQ ID NO: 26, SEQ ID NO: 28, SEQ ID NO. 30, SEQ ID NO: 32, SEQ ID NO: 65, SEQ ID NO: 67, SEQ ID NO: 69, SEQ ID NO: 71, SEQ ID NO: 73, SEQ ID NO: 75, SEQ ID NO: 77, SEQ ID NO: 79, SEQ ID NO: 81, SEQ ID NO: 83, SEQ ID NO: 85, SEQ ID NO: 87, SEQ ID NO: 89, SEQ ID NO: 91, SEQ ID NO: 93, SEQ ID NO: 95, SEQ ID NO: 97, SEQ ID NO: 99, SEQ ID NO: 101, SEQ ID NO: 103, SEQ ID NO: 105, SEQ ID NO: 107, SEQ ID NO: 109, SEQ ID NO: 111, SEQ ID NO: 113, SEQ ID NO: 115, SEQ ID NO: 117, SEQ ID NO: 119, SEQ ID NO: 121, SEQ ID NO: 123, SEQ ID NO: 125, SEQ ID NO: 127, SEQ ID NO: 129 SEQ ID NO: 131, SEQ ID NO: 133, SEQ ID NO: 135, SEQ ID NO: 137, SEQ ID NO: 139, SEQ ID NO: 141, SEQ ID NO: 143, SEQ ID NO: 152, SEQ ID NO: 154 SEQ ID NO: 156, SEQ ID NO: 158, SEQ ID NO: 160, SEQ ID NO: 162. SEQ ID NO: 164, SEQ ID NO: 166, SEQ ID NO: 168, SEQ ID NO: 170, SEQ ID NO: 172, SEQ ID NO: 174, SEQ ID NO: 176, SEQ ID NO: 178, SEQ ID NO: 180, SEQ ID NO: 182, SEQ ID NO: 184, SEQ ID NO: 186, SEQ ID NO: 188, SEQ ID NO: 190, SEQ ID NO: 192, SEQ ID NO: 194, SEQ ID NO: 196, SEQ ID NO: 198, SEQ ID NO: 200, SEQ ID NO: 202, SEQ ID NO: 204, SEQ ID NO: 206, SEQ ID NO: 208, SEQ ID NO: 210, SEQ ID NO: 212, SEQ ID NO: 214, SEQ ID NO: 216, SEQ ID NO: 218, SEQ ID NO: 220, SEQ ID NO: 229, SEQ ID NO:231, SEQ ID NO:233, SEQ ID NO: 235, SEQ ID NO: 237, SEQ ID NO: 239, SEQ ID NO: 241, SEQ ID NO: 243, SEQ ID NO: 250, SEQ ID NO: 252, SEQ ID NO: 254, SEQ ID NO: 256, SEQ ID NO: 258, SEQ ID NO: 260, SEQ ID NO: 262, SEQ ID NO: 264, SEQ ID NO: 266, SEQ ID NO: 268, SEQ ID NO: 270, SEQ ID NO: 272, SEQ ID NO: 283, SEQ ID NO: 285, SEQ ID NO: 287, SEQ ID NO: 289, SEQ ID NO: 291, SEQ ID NO: 293, SEQ ID NO: 295, SEQ ID NO: 297, SEQ ID NO: 299, SEQ ID NO: 301, SEQ ID NO: 303, SEQ ID NO: 305, SEQ ID NO: 307, SEQ ID NO: 309, SEQ ID NO: 311, SEQ ID NO: 313, SEQ ID NO: 315, SEQ ID NO: 317, SEQ ID NO: 319, SEQ ID NO: 321, SEQ ID NO: 323, SEQ ID NO: 325, SEQ ID NO: 327, SEQ ID NO: 329, SEQ ID NO: 331, SEQ ID NO: 333, SEQ ID NO: 335, SEQ ID NO: 337, SEQ ID NO: 339, SEQ ID NO: 341, SEQ ID NO: 343, SEQ ID NO: 345, SEQ ID NO: 347, SEQ ID NO: 349, SEQ ID NO: 351, SEQ ID NO: 353, SEQ ID NO: 355, SEQ ID NO: 357, SEQ ID NO: 359, SEQ ID NO: 361, SEQ ID NO: 363, SEQ ID NO: 365, SEQ ID NO: 367, SEQ ID NO: 369, SEQ ID NO: 371, SEQ ID NO: 373, SEQ ID NO: 375, SEQ ID NO: 377, SEQ ID NO: 379, SEQ ID NO: 381, SEQ ID NO: 383, SEQ ID NO: 385, SEQ ID NO: 387, SEQ ID NO: 389, SEQ ID NO: 391, SEQ ID NO: 393, SEQ ID NO: 395, SEQ ID NO: 397, SEQ ID NO: 399, SEQ ID NO: 401, SEQ ID NO: 403, SEQ ID NO: 405, SEQ ID NO: 407, SEQ ID NO: 409, SEQ ID NO: 411, SEQ ID NO: 413, SEQ ID NO: 415, SEQ ID NO: 417, SEQ ID NO: 419, SEQ ID NO: 421, SEQ ID NO: 423, SEQ ID NO: 425, SEQ ID NO: 427, SEQ ID NO: 429, SEQ ID NO: 431, SEQ ID NO: 433, SEQ ID NO: 435 or SEQ ID NO: 441 and having the biological activity represented by the protein according to claim 1 for inducing a co-suppression of an endogenous protein having the biological activity of the protein according to claim 1;
(f) introducing a nucleic acid molecule conferring the expression of a dominant-negative mutant of a protein having the biological activity of the protein according to claim 1;
(g) introducing a nucleic acid molecule encoding a factor, which binds to a nucleic acid molecule conferring the expression of a protein having the biological activity of the protein according to claim 1;
(h) introducing a viral nucleic acid molecule conferring the decline of a RNA molecule conferring the expression of a protein having the biological activity of the protein according to claim 1;
(i) introducing a nucleic acid construct capable to recombinant with a endogenous gene conferring the expression of a protein having the biological activity of the protein according to claim 1;
(j) introducing a non-silent mutation in a endogenous gene conferring the expression of a protein having the biological activity of the protein according to claim 1; or
(k) introducing an expression construct conferring the expression of the nucleic acid molecule characterized in any one of (a) to (i).

5. The process as claimed in claim 4, wherein a 5′- or 3′-nucleic acid sequence of less than 1000 bp derived from the sequences as represented in claim 4 (e) is used for the reduction or deletion of the biological activity of the protein and the step as described in claim 4 (a), (b), (e), (f) to (g) is used.

6. The process as claimed in claim 1, wherein the reduction or deletion of the biological activity of the protein is caused by a chemical compound.

7. The process as claimed in claim 1, wherein the organism is a transgenic organism selected from the group consisting of a microorganism, a non-human animal and a plant.

8. The process as claimed in claim 7, wherein the plant is selected from the group consisting of Anacardiaceae, Asteraceae, Apiaceae, Betulaceae, Boraginaceae, Brassicaceae, Bromeliaceae, Caricaceae, Cannabaceae, Convolvulaceae, Chenopodiaceae, Cucurbitaceae, Elaeagnaceae, Ericaceae, Euphorbiaceae, Fabaceae, Geraniaceae, Gramineae, Juglandaceae, Lauraceae, Leguminosae, Linaceae, perennial grass, fodder crops, vegetables and ornamentals.

9. The process as claimed in claim 7, wherein the microorganism is selected from the group consisting of Actinomycetaceae, Bacillaceae, Brevibacteriaceae, Corynebacteriaceae, Enterobacteriacae, Gordoniaceae, Micrococcaceae, Mycobacteriaceae, Nocardiaceae, Pseudomonaceae, Rhizobiaceae, Streptomycetaceae, Chaetomiaceae, Choanephoraceae, Cryptococcaceae, Cunninghamellaceae, Demetiaceae, Moniliaceae, Mortierellaceae, Mucoraceae, Pythiaceae, Sacharomycetaceae, Saprolegniaceae, Schizosacharomycetaceae, Sodariaceae, Sporobolomycetaceae, Tuberculariaceae, Adelotheciaceae, Dinophyceae, Ditrichaceae and Prasinophyceae.

10. An isolated nucleic acid molecule which comprises a nucleic acid molecule selected from the group consisting of:
a) a nucleic acid molecule which encodes a polypeptide comprising the polypeptide shown in SEQ ID NO: 2, SEQ ID NO: 4, SEQ ID NO: 6, SEQ ID NO: 8, SEQ ID NO: 10, SEQ ID NO: 12, SEQ ID NO: 14, SEQ ID NO: 16, SEQ ID NO: 20, SEQ ID NO: 22, SEQ ID NO: 24, SEQ ID NO: 26, SEQ ID NO: 28, SEQ ID NO. 30, SEQ ID NO: 32; SEQ ID NO: 65, SEQ ID NO: 67, SEQ ID NO: 69, SEQ ID NO: 71, SEQ ID NO: 73, SEQ ID NO: 75, SEQ ID NO: 77, SEQ ID NO: 79, SEQ ID NO: 81, SEQ ID NO: 83, SEQ ID NO: 85, SEQ ID NO: 87, SEQ ID NO: 89, SEQ ID NO: 91, SEQ ID NO: 93, SEQ ID NO: 95, SEQ ID NO: 97, SEQ ID NO: 99, SEQ ID NO: 101, SEQ ID NO: 103, SEQ ID NO: 105, SEQ ID NO: 107, SEQ ID NO: 109, SEQ ID NO: 111, SEQ ID NO: 113, SEQ ID NO: 115, SEQ ID NO: 117, SEQ ID NO: 119, SEQ ID NO: 121, SEQ ID NO: 123, SEQ ID NO: 125, SEQ ID NO: 127, SEQ ID NO: 129, SEQ ID NO: 131, SEQ ID NO: 133, SEQ ID NO: 135, SEQ ID NO: 137, SEQ ID NO: 139, SEQ ID NO: 141, SEQ ID NO: 143, SEQ ID NO: 152, SEQ ID NO: 154, SEQ ID NO: 156, SEQ ID NO: 158, SEQ ID NO: 160, SEQ ID NO: 162, SEQ ID NO: 164, SEQ ID NO: 166, SEQ ID NO: 168, SEQ ID NO: 170, SEQ ID NO: 172, SEQ ID NO: 174, SEQ ID NO: 176, SEQ ID NO: 178, SEQ ID NO: 180, SEQ ID NO: 182, SEQ ID NO: 184, SEQ ID NO: 186, SEQ ID NO: 188, SEQ ID NO: 190, SEQ ID NO: 192, SEQ ID NO: 194, SEQ ID NO: 196, SEQ ID NO: 198, SEQ ID NO: 200, SEQ ID NO: 202, SEQ ID NO: 204, SEQ ID NO: 206, SEQ ID NO: 208, SEQ ID NO: 210, SEQ ID NO: 212, SEQ ID NO: 214, SEQ ID NO: 216, SEQ ID NO: 218, SEQ ID NO: 220, SEQ ID NO: 229, SEQ ID NO:231, SEQ ID NO:233, SEQ ID NO: 235, SEQ ID NO: 237, SEQ ID NO: 239, SEQ ID NO: 241, SEQ ID NO: 243, SEQ ID NO: 250, SEQ ID NO: 252, SEQ ID NO: 254, SEQ ID NO: 256, SEQ ID NO: 258, SEQ ID NO: 260, SEQ ID NO: 262, SEQ ID NO: 264, SEQ ID NO: 266, SEQ ID NO: 268, SEQ ID NO: 270, SEQ ID NO: 272, SEQ ID NO: 283, SEQ ID NO: 285, SEQ ID NO: 287, SEQ ID NO: 289, SEQ ID NO: 291, SEQ ID NO: 293, SEQ ID NO: 295, SEQ ID NO: 297, SEQ ID NO: 299, SEQ ID NO: 301, SEQ ID NO: 303, SEQ ID NO: 305, SEQ ID NO: 307, SEQ ID NO: 309, SEQ ID NO: 311, SEQ ID NO: 313, SEQ ID NO: 315, SEQ ID NO: 317, SEQ ID NO: 319, SEQ ID NO: 321, SEQ ID NO: 323, SEQ ID NO: 325, SEQ ID NO: 327, SEQ ID NO: 329, SEQ ID NO: 331, SEQ ID NO: 333, SEQ ID NO: 335, SEQ ID NO: 337, SEQ ID NO: 339, SEQ ID NO: 341, SEQ ID NO: 343, SEQ ID NO: 345, SEQ ID NO: 347, SEQ ID NO: 349, SEQ ID NO: 351, SEQ ID NO: 353, SEQ ID NO: 355, SEQ ID NO: 357, SEQ ID NO: 359, SEQ ID NO: 361, SEQ ID NO: 363, SEQ ID NO: 365, SEQ ID NO: 367, SEQ ID NO: 369, SEQ ID NO: 371, SEQ ID NO: 373, SEQ ID NO: 375, SEQ ID NO: 377, SEQ ID NO: 379, SEQ ID NO: 381, SEQ ID NO: 383, SEQ ID NO: 385, SEQ ID NO: 387, SEQ ID NO: 389, SEQ ID NO: 391, SEQ ID NO: 393, SEQ ID NO: 395, SEQ ID NO: 397, SEQ ID NO: 399, SEQ ID NO: 401, SEQ ID NO: 403, SEQ ID NO: 405, SEQ ID NO: 407, SEQ ID NO: 409, SEQ ID NO: 411, SEQ ID NO: 413, SEQ ID NO: 415, SEQ ID NO: 417, SEQ ID NO: 419, SEQ ID NO: 421, SEQ ID NO: 423, SEQ ID NO: 425, SEQ ID NO: 427, SEQ ID NO: 429, SEQ ID NO: 431, SEQ ID NO: 433, SEQ ID NO: 435 or SEQ ID NO: 441;
b) a nucleic acid molecule which comprising the polynucleotide shown in SEQ ID NO: 2, SEQ ID NO: 4, SEQ ID NO: 6, SEQ ID NO: 8, SEQ ID NO: 10, SEQ ID NO: 12, SEQ ID NO: 14, SEQ ID NO: 16, SEQ ID NO: 20, SEQ ID NO: 22, SEQ ID NO: 24, SEQ ID NO: 26, SEQ ID NO: 28, SEQ ID NO. 30, SEQ ID NO: 32; SEQ ID NO: 65, SEQ ID NO: 67, SEQ ID NO: 69, SEQ ID NO: 71, SEQ ID NO: 73, SEQ ID NO: 75, SEQ ID NO: 77, SEQ ID NO: 79, SEQ ID NO: 81, SEQ ID NO: 83, SEQ ID NO: 85, SEQ ID NO: 87, SEQ ID NO: 89, SEQ ID NO: 91, SEQ ID NO: 93, SEQ ID NO: 95, SEQ ID NO: 97, SEQ ID NO: 99, SEQ ID NO: 101, SEQ ID NO: 103, SEQ ID NO: 105, SEQ ID NO: 107, SEQ ID NO: 109, SEQ ID NO: 11, SEQ ID NO: 113, SEQ ID NO: 115, SEQ ID NO: 117, SEQ ID NO: 119, SEQ ID NO: 121, SEQ ID NO: 123, SEQ ID NO: 125, SEQ ID NO: 127, SEQ ID NO: 129, SEQ ID NO: 131, SEQ ID NO: 133, SEQ ID NO: 135, SEQ ID NO: 137, SEQ ID NO: 139, SEQ ID NO: 141, SEQ ID NO: 143, SEQ ID NO: 152, SEQ ID NO: 154, SEQ ID NO: 156, SEQ ID NO: 158, SEQ ID NO: 160, SEQ ID NO: 162, SEQ ID NO: 164, SEQ ID NO: 166, SEQ ID NO: 168, SEQ ID NO: 170, SEQ ID NO: 172, SEQ ID NO: 174, SEQ ID NO: 176, SEQ ID NO: 178, SEQ ID NO: 180, SEQ ID NO: 182, SEQ ID NO: 184, SEQ ID NO: 186, SEQ ID NO: 188, SEQ ID NO: 190, SEQ ID NO: 192, SEQ ID NO: 194, SEQ ID NO: 196, SEQ ID NO: 198, SEQ ID NO: 200, SEQ ID NO: 202, SEQ ID NO: 204, SEQ ID NO: 206, SEQ ID NO: 208, SEQ ID NO: 210, SEQ ID NO: 212, SEQ ID NO: 214, SEQ ID NO: 216, SEQ ID NO: 218, SEQ ID NO: 220, SEQ ID NO: 229, SEQ ID NO:231, SEQ ID NO:233, SEQ ID NO: 235, SEQ ID NO: 237, SEQ ID NO: 239, SEQ ID NO: 241, SEQ ID NO: 243, SEQ ID NO: 250, SEQ ID NO: 252, SEQ ID NO: 254, SEQ ID NO: 256, SEQ ID NO: 258, SEQ ID NO: 260, SEQ ID NO: 262, SEQ ID NO: 264, SEQ ID NO: 266, SEQ ID NO: 268, SEQ ID NO: 270, SEQ ID NO: 272, SEQ ID NO: 283, SEQ ID NO: 285, SEQ ID NO: 287, SEQ ID NO: 289, SEQ ID NO: 291, SEQ ID NO: 293, SEQ ID NO: 295, SEQ ID NO: 297, SEQ ID NO: 299, SEQ ID NO: 301, SEQ ID NO: 303, SEQ ID NO: 305, SEQ ID NO: 307, SEQ ID NO: 309, SEQ ID NO: 311, SEQ ID NO: 313, SEQ ID NO: 315, SEQ ID NO: 317, SEQ ID NO: 319, SEQ ID NO: 321, SEQ ID NO: 323, SEQ ID NO: 325, SEQ ID NO: 327, SEQ ID NO: 329, SEQ ID NO: 331, SEQ ID NO: 333, SEQ ID NO: 335, SEQ ID NO: 337, SEQ ID NO: 339, SEQ ID NO: 341, SEQ ID NO: 343, SEQ ID NO: 345, SEQ ID NO: 347, SEQ ID NO: 349, SEQ ID NO: 351, SEQ ID NO: 353, SEQ ID NO: 355, SEQ ID NO: 357, SEQ ID NO: 359, SEQ ID NO: 361, SEQ ID NO: 363, SEQ ID NO: 365, SEQ ID NO: 367, SEQ ID NO: 369, SEQ ID NO: 371, SEQ ID NO: 373, SEQ ID NO: 375, SEQ ID NO: 377, SEQ ID NO: 379, SEQ ID NO: 381, SEQ ID NO: 383, SEQ ID NO: 385, SEQ ID NO: 387, SEQ ID NO: 389, SEQ ID NO: 391, SEQ ID NO: 393, SEQ ID NO: 395, SEQ ID NO: 397, SEQ ID NO: 399, SEQ ID NO: 401, SEQ ID NO: 403, SEQ ID NO: 405, SEQ ID NO: 407, SEQ ID NO: 409, SEQ ID NO: 411, SEQ ID NO: 413, SEQ ID NO: 415, SEQ ID NO: 417, SEQ ID NO: 419, SEQ ID NO: 421, SEQ ID NO: 423, SEQ ID NO: 425, SEQ ID NO: 427, SEQ ID NO: 429, SEQ ID NO: 431, SEQ ID NO: 433, SEQ ID NO: 435 or SEQ ID NO: 441;
c) a nucleic acid molecule comprising a nucleic acid sequence, which, as a result of the degeneracy of the genetic code, can be derived from a polypeptide sequence depicted in (b) and having the biological activity of the protein according to claim 1;
d) a nucleic acid molecule encoding a polypeptide having at least 50% identity with the amino acid sequence of the polypeptide encoded by the nucleic acid molecule of (a) or (c) and having the biological activity of the protein according to claim 1;
e) a nucleic acid molecule encoding a polypeptide, which is isolated with the aid of monoclonal antibodies against a polypeptide encoded by one of the nucleic acid molecules of (a) to (c) and having the biological activity of the protein according to claim 1;
f) a nucleic acid molecule encoding a polypeptide comprising the consensus sequence shown in SEQ ID NO: 33, SEQ ID NO: 34, SEQ ID NO: 146, SEQ ID NO: 147, SEQ ID NO: 148, SEQ ID NO: 149, SEQ ID NO: 150, SEQ ID NO: 223, SEQ ID NO: 224, SEQ ID NO: 225, SEQ ID NO: 226, SEQ ID NO: 227, SEQ ID NO: 246, SEQ ID NO: 247, SEQ ID NO: 248, SEQ ID NO: 273, SEQ ID NO: 274, SEQ ID NO: 275, SEQ ID NO: 276, SEQ ID NO: 277, SEQ ID NO: 278, SEQ ID NO: 279, SEQ ID NO: 280, SEQ ID NO: 281, SEQ ID NO: 438, SEQ ID NO: 439 or SEQ ID NO: 442 and having the biological activity of the protein according to claim 1;
g) a nucleic acid molecule encoding a polypeptide having the biological activity of the protein as depicted in SEQ ID NO: 2, SEQ ID NO: 4, SEQ ID NO: 6, SEQ ID NO: 8, SEQ ID NO: 10, SEQ ID NO: 12, SEQ ID NO: 14, SEQ ID NO: 16, SEQ ID NO: 20, SEQ ID NO: 22, SEQ ID NO: 24, SEQ ID NO: 26, SEQ ID NO: 28, SEQ ID NO. 30, SEQ ID NO: 32; SEQ ID NO: 65, SEQ ID NO: 67, SEQ ID NO: 69, SEQ ID NO: 71, SEQ ID NO: 73, SEQ ID NO: 75, SEQ ID NO: 77, SEQ ID NO: 79, SEQ ID NO: 81, SEQ ID NO: 83, SEQ ID NO: 85, SEQ ID NO: 87, SEQ ID NO: 89, SEQ ID NO: 91, SEQ ID NO: 93, SEQ ID NO: 95, SEQ ID NO: 97, SEQ ID NO: 99, SEQ ID NO: 101, SEQ ID NO: 103, SEQ ID NO: 105, SEQ ID NO: 107, SEQ ID NO: 109, SEQ ID NO: 111, SEQ ID NO: 113, SEQ ID NO: 115, SEQ ID NO: 117, SEQ ID NO: 119, SEQ ID NO: 121, SEQ ID NO: 123, SEQ ID NO: 125, SEQ ID NO: 127, SEQ ID NO: 129, SEQ ID NO: 131, SEQ ID NO: 133, SEQ ID NO: 135, SEQ ID NO: 137, SEQ ID NO: 139, SEQ ID NO: 141, SEQ ID NO: 143, SEQ ID NO: 152, SEQ ID NO: 154, SEQ ID NO: 156, SEQ ID NO: 158, SEQ ID NO: 160, SEQ ID NO: 162, SEQ ID NO: 164, SEQ ID NO: 166, SEQ ID NO: 168, SEQ ID NO: 170, SEQ ID NO: 172, SEQ ID NO: 174, SEQ ID NO: 176, SEQ ID NO: 178, SEQ ID NO: 180, SEQ ID NO: 182, SEQ ID NO: 184, SEQ ID NO: 186, SEQ ID NO: 188, SEQ ID NO: 190, SEQ ID NO: 192, SEQ ID NO: 194, SEQ ID NO: 196, SEQ ID NO: 198, SEQ ID NO: 200, SEQ ID NO: 202, SEQ ID NO: 204, SEQ ID NO: 206, SEQ ID NO: 208, SEQ ID NO: 210, SEQ ID NO: 212, SEQ ID NO: 214, SEQ ID NO: 216, SEQ ID NO: 218, SEQ ID NO: 220, SEQ ID NO: 229, SEQ ID NO:231, SEQ ID NO:233, SEQ ID NO: 235, SEQ ID NO: 237, SEQ ID NO: 239, SEQ ID NO: 241, SEQ ID NO: 243, SEQ ID NO: 250, SEQ ID NO: 252, SEQ ID NO: 254, SEQ ID NO: 256, SEQ ID NO: 258, SEQ ID NO: 260, SEQ ID NO: 262, SEQ ID NO: 264, SEQ ID NO: 266, SEQ ID NO: 268, SEQ ID NO: 270, SEQ ID NO: 272, SEQ ID NO: 283, SEQ ID NO: 285, SEQ ID NO: 287, SEQ ID NO: 289, SEQ ID NO: 291, SEQ ID NO: 293, SEQ ID NO: 295, SEQ ID NO: 297, SEQ ID NO: 299, SEQ ID NO: 301, SEQ ID NO: 303, SEQ ID NO: 305, SEQ ID NO: 307, SEQ ID NO: 309, SEQ ID NO: 311, SEQ ID NO: 313, SEQ ID NO: 315, SEQ ID NO: 317, SEQ ID NO: 319, SEQ ID NO: 321, SEQ ID NO: 323, SEQ ID NO: 325, SEQ ID NO: 327, SEQ ID NO: 329, SEQ ID NO: 331, SEQ ID NO: 333, SEQ ID NO: 335, SEQ ID NO: 337, SEQ ID NO: 339, SEQ ID NO: 341, SEQ ID NO: 343, SEQ ID NO: 345, SEQ ID NO: 347, SEQ ID NO: 349, SEQ ID NO: 351, SEQ ID NO: 353, SEQ ID NO: 355, SEQ ID NO: 357, SEQ ID NO: 359, SEQ ID NO: 361, SEQ ID NO: 363, SEQ ID NO: 365, SEQ ID NO: 367, SEQ ID NO: 369, SEQ ID NO: 371, SEQ ID NO: 373, SEQ ID NO: 375, SEQ ID NO: 377, SEQ ID NO: 379, SEQ ID NO: 381, SEQ ID NO: 383, SEQ ID NO: 385, SEQ ID NO: 387, SEQ ID NO: 389, SEQ ID NO: 391, SEQ ID NO: 393, SEQ ID NO: 395, SEQ ID NO: 397, SEQ ID NO: 399, SEQ ID NO: 401, SEQ ID NO: 403, SEQ ID NO: 405, SEQ ID NO: 407, SEQ ID NO: 409, SEQ ID NO: 411, SEQ ID NO: 413, SEQ ID NO: 415, SEQ ID NO: 417, SEQ ID NO: 419, SEQ ID NO: 421, SEQ ID NO: 423, SEQ ID NO: 425, SEQ ID NO: 427, SEQ ID NO: 429, SEQ ID NO: 431, SEQ ID NO: 433, SEQ ID NO: 435 or SEQ ID NO: 441;
h) a nucleic acid molecule which is obtainable by screening a suitable library under stringent hybridisation conditions with a probe comprising one of the sequences of the nucleic acid molecule of (a) to (c) or with a fragment of at least 15 nt, 20 nt, 30 nt, 50 nt, 100 nt, 200 nt or 500 nt of the nucleic acid molecule characterized in (a) to (i) and encoding a polypeptide having the biological activity of the protein according to claim 1;
or which comprises a sequence which is complementary thereto; whereby the nucleic acid molecule according to (a) to (h) differs at least in one or more nucleotides from the sequence depicted in SEQ ID NO: 1, SEQ ID NO: 3, SEQ ID NO: 5, SEQ ID NO: 7, SEQ ID NO: 9, SEQ ID NO: 11, SEQ ID NO: 13, SEQ ID NO: 15, SEQ ID NO: 19, SEQ ID NO: 21, SEQ ID NO: 23, SEQ ID NO: 25, SEQ ID NO: 27, SEQ ID NO: 29, SEQ ID NO: 31; SEQ ID NO: 64, SEQ ID NO: 66, SEQ ID NO: 68, SEQ ID NO: 70, SEQ ID NO: 72, SEQ ID NO: 74, SEQ ID NO: 76, SEQ ID NO: 78, SEQ ID NO: 80, SEQ ID NO: 82, SEQ ID NO: 84, SEQ ID NO: 86, SEQ ID NO: 88, SEQ ID NO: 90, SEQ ID NO: 92, SEQ ID NO: 94, SEQ ID NO: 96, SEQ ID NO: 98, SEQ ID NO: 100, SEQ ID NO: 102, SEQ ID NO: 104, SEQ ID NO: 106, SEQ ID NO: 108, SEQ ID NO: 110, SEQ ID NO: 112, SEQ ID NO: 114, SEQ ID NO: 116, SEQ ID NO: 118, SEQ ID NO: 120, SEQ ID NO: 122, SEQ ID NO: 124, SEQ ID NO: 126, SEQ ID NO: 128, SEQ ID NO: 130, SEQ ID NO: 132, SEQ ID NO: 134, SEQ ID NO: 136, SEQ ID NO: 138, SEQ ID NO: 140, SEQ ID NO: , SEQ ID NO: 142, SEQ ID NO: 151, SEQ ID NO: 153, SEQ ID NO: 155, SEQ ID NO: 157, SEQ ID NO: 159, SEQ ID NO: 161, SEQ ID NO: 163, SEQ ID NO: 165, SEQ ID NO: 167, SEQ ID NO: 169, SEQ ID NO: 171, SEQ ID NO: 173, SEQ ID NO: 175, SEQ ID NO: 177, SEQ ID NO: 179, SEQ ID NO: 181, SEQ ID NO: 183, SEQ ID NO: 185, SEQ ID NO: 187, SEQ ID NO: 189, SEQ ID NO: 191, SEQ ID NO: 193, SEQ ID NO: 195, SEQ ID NO: 197, SEQ ID NO: 199, SEQ ID NO: 201, SEQ ID NO: 203, SEQ ID NO: 205, SEQ ID NO: 207, SEQ ID NO: 209, SEQ ID NO: 211, SEQ ID NO: 213, SEQ ID NO: 215, SEQ ID NO: 217, SEQ ID NO: 219, SEQ ID NO: 228, SEQ ID NO: 230, SEQ ID NO: 232, SEQ ID NO: 234, SEQ ID NO: 236, SEQ ID NO: 238, SEQ ID NO: 240, SEQ ID NO: 242, SEQ ID NO: 249, SEQ ID NO: 251, SEQ ID NO: 253, SEQ ID NO: 255, SEQ ID NO: 257, SEQ ID NO: 259, SEQ ID NO: 261, SEQ ID NO: 263, SEQ ID NO: 265, SEQ ID NO: 267, SEQ ID NO: 269, SEQ ID NO: 271, SEQ ID NO: 282, SEQ ID NO: 284, SEQ ID NO: 286, SEQ ID NO: 288, SEQ ID NO: 290, SEQ ID NO: 292, SEQ ID NO: 294, SEQ ID NO: 296, SEQ ID NO: 298, SEQ ID NO: 300, SEQ ID NO: 302, SEQ ID NO: 304, SEQ ID NO: 306, SEQ ID NO: 308, SEQ ID NO: 310, SEQ ID NO: 312, SEQ ID NO: 314, SEQ ID NO: 316, SEQ ID NO: 318, SEQ ID NO: 320, SEQ ID NO: 322, SEQ ID NO: 324, SEQ ID NO: 326, SEQ ID NO: 328, SEQ ID NO: 330, SEQ ID NO: 332, SEQ ID NO: 334, SEQ ID NO: 336, SEQ ID NO: 338, SEQ ID NO: 340, SEQ ID NO: 342, SEQ ID NO: 344, SEQ ID NO: 346, SEQ ID NO: 348, SEQ ID NO: 350, SEQ ID NO: 352, SEQ ID NO: 354, SEQ ID NO: 356, SEQ ID NO: 358, SEQ ID NO: 360, SEQ ID NO: 362, SEQ ID NO: 364, SEQ ID NO: 366, SEQ ID NO: 368, SEQ ID NO: 370, SEQ ID NO: 372, SEQ ID NO: 374, SEQ ID NO: 376, SEQ ID NO: 378, SEQ ID NO: 380, SEQ ID NO: 382, SEQ ID NO: 384, SEQ ID NO: 386, SEQ ID NO: 388, SEQ ID NO: 390, SEQ ID NO: 392, SEQ ID NO: 394, SEQ ID NO: 396, SEQ ID NO: 398, SEQ ID NO: 400, SEQ ID NO: 402, SEQ ID NO: 404, SEQ ID NO: 406, SEQ ID NO: 408, SEQ ID NO: 410, SEQ ID NO: 412, SEQ ID NO: 414, SEQ ID NO: 416, SEQ ID NO: 418, SEQ ID NO: 420, SEQ ID NO: 422, SEQ ID NO: 424, SEQ ID NO: 426, SEQ ID NO: 428, SEQ ID NO: 430, SEQ ID NO: 432, SEQ ID NO: 434 or SEQ ID NO: 440 and which encodes a protein which differs at least in one or more amino acids from the protein sequences depicted in SEQ ID NO: 2, SEQ ID NO: 4, SEQ ID NO: 6, SEQ ID NO: 8, SEQ ID NO: 10, SEQ ID NO: 12, SEQ ID NO: 14, SEQ ID NO: 16, SEQ ID NO: 20, SEQ ID NO: 22, SEQ ID NO: 24, SEQ ID NO: 26, SEQ ID NO: 28, SEQ ID NO. 30, SEQ ID NO: 32; SEQ ID NO: 65, SEQ ID NO: 67, SEQ ID NO: 69, SEQ ID NO: 71, SEQ ID NO: 73, SEQ ID NO: 75, SEQ ID NO: 77, SEQ ID NO: 79, SEQ ID NO: 81, SEQ ID NO: 83, SEQ ID NO: 85, SEQ ID NO: 87, SEQ ID NO: 89, SEQ ID NO: 91, SEQ ID NO: 93, SEQ ID NO: 95, SEQ ID NO: 97, SEQ ID NO: 99, SEQ ID NO: 101, SEQ ID NO: 103, SEQ ID NO: 105, SEQ ID NO: 107, SEQ ID NO: 109, SEQ ID NO: 111, SEQ ID NO: 113, SEQ ID NO: 115, SEQ ID NO: 117, SEQ ID NO: 119, SEQ ID NO: 121, SEQ ID NO: 123, SEQ ID NO: 125, SEQ ID NO: 127, SEQ ID NO: 129, SEQ ID NO: 131, SEQ ID NO: 133, SEQ ID NO: 135, SEQ ID NO: 137, SEQ ID NO: 139, SEQ ID NO: 141, SEQ ID NO: 143, SEQ ID NO: 152, SEQ ID NO: 154, SEQ ID NO: 156, SEQ ID NO: 158, SEQ ID NO: 160, SEQ ID NO: 162, SEQ ID NO: 164, SEQ ID NO: 166, SEQ ID NO: 168, SEQ ID NO: 170, SEQ ID NO: 172, SEQ ID NO: 174, SEQ ID NO: 176, SEQ ID NO: 178, SEQ ID NO: 180, SEQ ID NO: 182, SEQ ID NO: 184, SEQ ID NO: 186, SEQ ID NO: 188, SEQ ID NO: 190, SEQ ID NO: 192, SEQ ID NO: 194, SEQ ID NO: 196, SEQ ID NO: 198, SEQ ID NO: 200, SEQ ID NO: 202, SEQ ID NO: 204, SEQ ID NO: 206, SEQ ID NO: 208, SEQ ID NO: 210, SEQ ID NO: 212, SEQ ID NO: 214, SEQ ID NO: 216, SEQ ID NO: 218, SEQ ID NO: 220, SEQ ID NO: 229, SEQ ID NO:231, SEQ ID NO:233, SEQ ID NO: 235, SEQ ID NO: 237, SEQ ID NO: 239, SEQ ID NO: 241, SEQ ID NO: 243, SEQ ID NO: 250, SEQ ID NO: 252, SEQ ID NO: 254, SEQ ID NO: 256, SEQ ID NO: 258, SEQ ID NO: 260, SEQ ID NO: 262, SEQ ID NO: 264, SEQ ID NO: 266, SEQ ID NO: 268, SEQ ID NO: 270, SEQ ID NO: 272, SEQ ID NO: 283, SEQ ID NO: 285, SEQ ID NO: 287, SEQ ID NO: 289, SEQ ID NO: 291, SEQ ID NO: 293, SEQ ID NO: 295, SEQ ID NO: 297, SEQ ID NO: 299, SEQ ID NO: 301, SEQ ID NO: 303, SEQ ID NO: 305, SEQ ID NO: 307, SEQ ID NO: 309, SEQ ID NO: 311, SEQ ID NO: 313, SEQ ID NO: 315, SEQ ID NO: 317, SEQ ID NO: 319, SEQ ID NO: 321, SEQ ID NO: 323, SEQ ID NO: 325, SEQ ID NO: 327, SEQ ID NO: 329, SEQ ID NO: 331, SEQ ID NO: 333, SEQ ID NO: 335, SEQ ID NO: 337, SEQ ID NO: 339, SEQ ID NO: 341, SEQ ID NO: 343, SEQ ID NO: 345, SEQ ID NO: 347, SEQ ID NO: 349, SEQ ID NO: 351, SEQ ID NO: 353, SEQ ID NO: 355, SEQ ID NO: 357, SEQ ID NO: 359, SEQ ID NO: 361, SEQ ID NO: 363, SEQ ID NO: 365, SEQ ID NO: 367, SEQ ID NO: 369, SEQ ID NO: 371, SEQ ID NO: 373, SEQ ID NO: 375, SEQ ID NO: 377, SEQ ID NO: 379, SEQ ID NO: 381, SEQ ID NO: 383, SEQ ID NO: 385, SEQ ID NO: 387, SEQ ID NO: 389, SEQ ID NO: 391, SEQ ID NO: 393, SEQ ID NO: 395, SEQ ID NO: 397, SEQ ID NO: 399, SEQ ID NO: 401, SEQ ID NO: 403, SEQ ID NO: 405, SEQ ID NO: 407, SEQ ID NO: 409, SEQ ID NO: 411, SEQ ID NO: 413, SEQ ID NO: 415, SEQ ID NO: 417, SEQ ID NO: 419, SEQ ID NO: 421, SEQ ID NO: 423, SEQ ID NO: 425, SEQ ID NO: 427, SEQ ID NO: 429, SEQ ID NO: 431, SEQ ID NO: 433, SEQ ID NO: 435 or SEQ ID NO: 441.

11. A double-stranded RNA molecule (dsRNA), whereby the sense strand of said double-stranded RNA nucleic acid molecule has a homology of at least 30% to the nucleic acid molecule of claim 10 or encoding a protein conferring the expression of a protein having the biological activity of the protein as depicted in SEQ ID NO: 2, SEQ ID NO: 8, SEQ ID NO: 20, SEQ ID NO: 65, SEQ ID NO: 152, SEQ ID NO: 229 or SEQ ID NO: 283 or comprising a fragment of at least 17 base pairs of a nucleic acid molecule with a homology of at least 50% to a nucleic acid molecule conferring the expression of a protein having the biological activity of the protein as depicted in SEQ ID NO: 2, SEQ ID NO: 8, SEQ ID NO: 20, SEQ ID NO: 65, SEQ ID NO: 152, SEQ ID NO: 229 or SEQ ID NO: 283 or to the nucleic acid molecule of claim 10.

12. The dsRNA molecule of claim 11, whereby the sense strand and the antisense strand covalently bound to each other and the antisense strand is essentially the complement of the “sense”-RNA strand.

13. An antisense nucleic acid molecule, whereby the antisense nucleic acid molecule has a homology of at least 30% to a nucleic acid molecule antisense to a nucleic acid molecule encoding the protein encoded by the nucleic acid molecule of claim 10 or the nucleic acid molecule of claim 10 or a nucleic acid molecule encoding a protein conferring the expression of a protein having the biological activity of the protein as depicted in SEQ ID NO: 2, SEQ ID NO: 8, SEQ ID NO: 20, SEQ ID NO: 65, SEQ ID NO: 152, SEQ ID NO: 229 or SEQ ID NO: 283.

14. A ribozyme which specifically cleaves a nucleic acid molecule conferring expression of a protein having the biological activity of the protein as depicted in SEQ ID NO: 2, SEQ ID NO: 8, SEQ ID NO: 20, SEQ ID NO: 65, SEQ ID NO: 152, SEQ ID NO: 229 or SEQ ID NO: 283 or a nucleic acid molecule encoding the protein encoded by the nucleic acid molecule of claim 10 or the nucleic acid molecule of claim 10.

15. A viral nucleic acid molecule conferring the decline of an RNA molecule conferring the expression of a protein having the biological activity of the protein as depicted in SEQ ID NO: 2, SEQ ID NO: 8, SEQ ID NO: 20, SEQ ID NO: 65, SEQ ID NO: 152, SEQ ID NO: 229 or SEQ ID NO: 283 or of a nucleic acid molecule encoding the protein encoded by the nucleic acid molecule of claim 10 or of the nucleic acid molecule of claim 10.

16. A dominant-negative mutant of the protein produced by the process of claim 24.

17. A nucleic acid molecule encoding the dominant negative mutant of claim 16.

18. A nucleic acid construct conferring the expression of the dsRNA molecule of claim 11.

19. A nucleic acid construct comprising the isolated nucleic acid molecule as claimed in claim 10, wherein the nucleic acid is functionally linked to one or more regulatory signals.

20. A vector comprising the nucleic acid molecule as claimed in claim 10.

21. The vector as claimed in claim 20, wherein the nucleic acid molecule is in operable linkage with regulatory sequences for the expression in a prokaryotic or eukaryotic, or in a prokaryotic and eukaryotic host.

22. A transgenic host cell which has been transformed stably or transiently with the nucleic acid molecule as claimed in claim 10.

23. The transgenic host cell as claimed in claim 22, whereby the host cell is microorganism, a non-human animal or a plant cell.

24. A process for producing a polypeptide encoded by the nucleic acid sequence as claimed in claim 10, comprising expressing the polypeptide in a host cell.

25. The process as claimed in claim 24, wherein the host cell is a plant cell selected from the group consisting of Anacardiaceae, Asteraceae, Apiaceae, Betulaceae, Boraginaceae, Brassicaceae, Bromeliaceae, Caricaceae, Cannabaceae, Convolvulaceae, Chenopodiaceae, Cucurbitaceae, Elaeagnaceae, Ericaceae, Euphorbiaceae, Fabaceae, Geraniaceae, Gramineae, Juglandaceae, Lauraceae, Leguminosae, Linaceae, perennial grass, fodder crops, vegetables and ornamentals.

26. An isolated polypeptide encoded by the nucleic acid molecule as claimed in claim 10.

27. An antibody, which specifically binds to the polypeptide as claimed in claim 26.

28. A plant tissue, plant, harvested plant material or propagation material of a plant comprising the plant cell as claimed in claim 22.

29. A method for screening for an antagonist of the biological activity of the protein as depicted in SEQ ID NO: 2, SEQ ID NO: 8, SEQ ID NO: 20, SEQ ID NO: 65, SEQ ID NO: 152, SEQ ID NO: 229 or SEQ ID NO: 283 comprising:
a. contacting an organism, its cells, tissues or parts, which express the polypeptide of claim 26 with a chemical compound or a sample comprising a plurality of chemical compounds under conditions which permit the reduction or deletion of the expression of the nucleic acid molecule encoding a protein having the biological activity of the protein or which permit the reduction or deletion of the biological activity of the protein;
b. assaying the level of the biological activity of the protein or the polypeptide expression level in the organism, its cells, tissues or parts or in the culture medium of the organism, its cells, tissues or parts, wherein the organism, its cells, tissues or parts is cultured or maintained in; and
c. identifying an antagonist by comparing the measured level of the biological activity of the protein or the polypeptide expression level with a standard level of the biological activity of the protein or the polypeptide expression level measured in the absence of said chemical compound or a sample comprising said plurality of chemical compounds, whereby an decreased level in comparison to the standard indicates that the chemical compound or the sample comprising said plurality of chemical compounds is an antagonist.

30. A process for the identification of a compound conferring increased methionine production in a plant, a non-human animal or a microorganism, comprising the steps:
a. culturing or maintaining a plant or animal cell or their tissues or microorganism expressing the polypeptide of claim 26 or a polynucleotide encoding said polypeptide and a readout system capable of interacting with the polypeptide under suitable conditions which permit the interaction of the polypeptide with this readout system in the presence of a chemical compound or a sample comprising a plurality of chemical compounds and capable of providing a detectable signal in response to the binding of a chemical compound to said polypeptide under conditions which permit the depression of said readout system and of the protein as depicted in SEQ ID NO: 2, SEQ ID NO: 8, SEQ ID NO: 20, SEQ ID NO: 65, SEQ ID NO: 152, SEQ ID NO: 229 or SEQ ID NO: 283; and
b. identifying if the chemical compound is an effective antagonist by detecting the presence or absence or decrease or increase of a signal produced by said readout system.

31. A method for the production of an agricultural composition comprising the steps of screening the antagonist according to the method of claim 29 and formulating the compound identified in a form acceptable for an application in agriculture.

32. A composition comprising the polypeptide of claim 26 and optionally a agricultural acceptable carrier.

33. Food or feed composition comprising the nucleic acid molecule of claim 10, a polypeptide encoded thereof, or a nucleic acid construct or a vector containing the same.

34. A method for the identification of a gene product conferring an increase in methionine production in an organism, comprising the following steps:
a. identifying nucleic acid molecules of an organism; which can contain a candidate gene encoding a gene product conferring an increase in methionine after reduction or deletion of its expression, which are at least 30%, homologous to the nucleic acid molecule of the present invention, for example via homology search in a data bank;
b. introducing the candidate nucleic acid molecules in host cells, preferably in a plant cells or microorganisms, appropriate for producing methionine;
c. reducing or deleting the expression of the identified nucleic acid molecules in the host cells;
d. assaying the methionine level in the host cells; and
e. identifying the nucleic acid molecule and its gene product which reduction or deletion of expression confers an increase in the methionine level in the host cell after expression compared to the wild type.
